(19) United States
(12) Patent Application Publication
(10) Pub. No.: US 2023/0235309 A1
(43) Pub. Date: Jul. 27, 2023

(54) ADENINE BASE EDITORS AND USES THEREOF

(71) Applicants: The Broad Institute, Inc., Cambridge, MA (US); President and Fellows of Harvard College, Cambridge, MA (US)

(72) Inventors: David R. Liu, Cambridge, MA (US); Michelle Richter, Cambridge, MA (US); Kevin Tianmeng Zhao, Cambridge, MA (US); Benjamin Thuronyi, Cambridge, MA (US); Gregory Newby, Cambridge, MA (US)

(73) Assignees: The Broad Institute, Inc., Cambridge, MA (US); President and Fellows of Harvard College, Cambridge, MA (US)

(21) Appl. No.: 17/797,701

(22) PCT Filed: Feb. 5, 2021
(86) PCT No.: PCT/US2021/016827

§ 371 Date: Aug. 4, 2022

Related U.S. Application Data
(60) Provisional application No. 62/970,666, filed on Feb. 5, 2020.

(51) Int. Cl. C12N 9/78; C12N 15/10

(52) U.S. Cl. CPC C12N 9/78; C12Y 305/04004; C12N 15/102; C07K 2319/80; C07K 2319/09; C07K 2319/92

(57) ABSTRACT

The present disclosure provides adenine base editors (ABEs) that are variants of known adenine base editors. The adenosine deaminase domain of a known ABE was modified to produce adenosine deaminase variants. The deaminase variants provided herein have broader compatibility with diverse napDNAbp domains, such as Cas homologs, for base editing applications. The ABEs provided herein comprise a deaminase variant and a napDNAbp domain. The ABEs provided herein exhibit reduced off-target editing effects while retaining high on-target editing efficiencies. These ABEs exhibit reduced off-target DNA editing effects and reduced off-target editing effects in cellular mRNA. In addition, methods for targeted nucleic acid editing are provided. Further provided are pharmaceutical compositions comprising the ABEs. Also provided are vectors and kits useful for the generation and delivery of the ABEs, including vector systems for engineering the ABEs through directed evolution. Cells containing such vectors and ABEs are also provided. Further provided are methods of treatment comprising administering the ABEs.

### RELATED APPLICATIONS

[0001] This application is a national stage filing under 35 U.S.C. § 371 of International PCT Application PCT/US2021/016827, filed Feb. 5, 2021, which claims priority under 35 U.S.C. § 119(e) to U.S. Provisional Application, U.S. Ser. No. 62/970,666, filed on Feb. 5, 2020, each of which is incorporated herein by reference.

### GOVERNMENT SUPPORT

[0002] This invention was made with government support under grant numbers U01 AI142756, RM1 HG009490, R01 EB022376, and R35 GM118062 awarded by the National Institutes of Health. The government has certain rights in the invention.

### REFERENCE TO A SEQUENCE LISTING SUBMITTED AS A TEXT FILE VIA EFS-WEB

[0003] This application contains a Sequence Listing which has been submitted in ASCII format via EFS-Web and is hereby incorporated by reference in its entirety. Said ASCII copy, created on Jul. 27, 2022, is named B119570089US01-SEQ-EPG and is 1,654,749 bytes in size.

### BACKGROUND OF THE INVENTION

[0004] Base editors enable the precise installation of targeted point mutations in genomic DNA without creating double-stranded DNA breaks (DSBs). Adenine base editors (ABEs) convert a target A•T base pair to a G•C base pair. Because the mutation of G•C base pairs to A•T base pairs is the most common form of de novo mutation, ABEs have the potential to correct almost half of the known human pathogenic point mutations. The original adenine base editor, ABE7.10, can perform remarkably clean and efficient A•T-to-G•C conversion in DNA with very low levels of undesirable by-products, such as small insertions or deletions (indels), in cultured cells, adult mice, plants, and other organisms. Reference is made to International Patent Application No. PCT/US2018/056146, filed Oct. 16, 2018, Koblan et al., Nat Biotechnol (2018) and Gaudelli et al., Nature 551, 464-471 (2017).

[0005] Although adenine base editors (ABEs) in principle can correct the largest class of pathogenic point mutations, efforts to apply ABEs have been constrained by the limited compatibility of the adenosine deaminase domain of the ABEs with Cas homologs other than canonical Cas proteins, such as S. pyogenes Cas9 (SpCas9).

[0006] There is a need in the art for novel adenine base editors that have adenosine deaminase domains with broader compatibility with other Cas domains and also preferably have reduced off-target effects while retaining high on-target deamination efficiencies.

### SUMMARY OF THE INVENTION

[0007] The recent development of adenine base editors by fusion of an adenosine deaminase to Cas9 enables guide RNA (gRNA)-targeted single nucleotide deamination for A:T to G:C base pair conversion using adenine base editors within a specific target window. Various engineered base editors with improved DNA editing efficiencies have been recently developed. Reference is made to Komor, A. C. et al., Improved base excision repair inhibition and bacteriophage Mu Gam protein yields C:G-to-T:A base editors with higher efficiency and product purity, Sci Adv 3 (2017); Rees, H. A. et al., Improving the DNA specificity and applicability of base editing through protein engineering and protein delivery, Nat. Commun. 8, 15790 (2017); U.S. Patent Publication No. 2018/0073012, published Mar. 15, 2018, U.S. Patent Publication No. 2017/0121693, published May 4, 2017, International Publication No. WO 2017/070633, published Apr. 27, 2017, and U.S. Patent Publication No. 2015/0166980, published Jun. 18, 2015, U.S. Pat. No. 9,840,699, issued Dec. 12, 2017, U.S. Pat. No. 10,077,453, issued Sep. 18, 2018; International Application No. PCT/US2020/21362, filed Mar. 6, 2020; International Publication No. WO 2020/214842, published Oct. 22, 2020; International Application No. PCT/US2019/61685, filed Nov. 15, 2019, which published as WO 2020/102659 on May 22, 2020; and International Application No. PCT/US2020/062428, filed Nov. 25, 2020, each of which are incorporated herein in their entireties. Base editors (BEs) are typically fusions of a Cas (“CRISPR-associated”) domain and a nucleobase (or “base”) modification domain (e.g., a natural or evolved deaminase, such as an adenosine deaminase domain). In some cases, base editors may also include proteins or domains that alter cellular DNA repair processes to increase the efficiency, incorporation, and/or stability of the resulting single-nucleotide change.

[0008] Base editors reported to date contain a catalytically impaired Cas9 domain fused to a nucleobase modification domain. The Cas9 domain directs the nucleobase modification domain to directly convert one base to another at a guide RNA-programmed target site¹⁻³. Two classes of base editors have been developed to date^{1, 2, 14-16}: Cytosine base editors (CBEs), which convert C•G to T•A, and adenine base editors (ABEs), which convert A•T to G•C. Collectively, CBEs and ABEs enable the correction of all four types of transition mutations (C to T, G to A, A to G, and T to C). As half of known disease-associated gene variants are point mutations, and transition mutations account for ˜60% of known pathogenic point mutations^{4, 5}, base editors are being widely used to study and treat genetic diseases in a variety of cell types and organisms, including animal models of human genetic diseases^{3, 17-27}.

[0009] ABEs are especially useful for the study and correction of pathogenic alleles, as nearly half of pathogenic point mutations in principle can be corrected by converting an A•T base pair to a G•C base pair^{4, 5}. Many of the ABEs reported to date include a single polypeptide chain containing a heterodimer of a wild-type E. coli TadA monomer that plays a structural role during base editing and a laboratory-evolved E. coli TadA monomer (TadA*) that catalyzes deoxyadenosine deamination, and a Cas9 (D10A) nickase. Wild type E. coli TadA acts as a homodimer to deaminate an adenosine located in a tRNA anticodon loop, generating inosine (I). Although early ABE variants required a heterodimeric TadA containing an N-terminal wild-type TadA monomer for maximal activity, Joung et al. showed that later ABE variants have comparable activity with and without the wild-type TadA monomer⁴².

[0010] Base editing requires the presence of a PAM located approximately 15 base pairs from the target nucleotide(s) for canonical (i.e., S. pyogenes Cas9-derived) base editors¹⁻³. Each programmable DNA-binding protein domain recognizes a different PAM sequence. Only about one quarter of pathogenic transition point mutations have a suitably located canonical PAM “NGG” sequence that is compatible with S. pyogenes Cas9-derived base editors⁶⁻⁸. Cytidine deaminases have proven to be broadly compatible with many Cas homologs, including SaCas9⁸, SaCas9-KKH⁸, Cas12a (Cpf1)^{9, 10}, SpCas9-NG¹¹, and circularly permuted CP-Cas9s⁷, greatly expanding their targeting scope. Existing adenosine deaminases have unfortunately shown limited compatibility with Cas homologs. Some Cas homologs, such as SaCas9⁷, SaCas9-KKH⁷, SpCas9-NG¹¹, and CP-Cas9s⁷, are compatible with ABEs, but editing efficiencies are substantially lower than those of the corresponding CBEs, and other homologs such as LbCas12a and enAsCas12a show virtually no activity as an ABE^{9, 10}.

[0011] The present disclosure is based, at least in part, on the evolution of existing adenine base editors to produce variant ABEs with broadened compatibility with diverse Cas homologs, as well as improved targeting scope and efficiency. It was hypothesized that very low to modest efficiency of many non-SpCas9 ABEs arises from a low rate of adenosine deamination (low kₐₚₚ) combined with the shorter residence time on DNA (high k_{off}) of many Cas homologs compared to that of SpCas9²⁸. The adenosine deaminase domain of the ABE7.10 base editor is TadA7.10, a deoxyadenosine deaminase that was previously evolved from an E. coli tRNA adenosine deaminase (ecTadA, or TadA) to act on single-stranded DNA². TadA7.10 is also the deaminase domain of ABEmax, which is a variant of ABE7.10 that has been codon optimized for expression in human cells. TadA7.10 comprises the following substitutions in ecTadA: W23R, H36L, P48A, R51L, L84F, A106V, D108N, H123Y, S146C, D147Y, R152P, E155V, I156F, and K157N. Reference is made to International Publication No. WO 2018/027078, published Aug. 2, 2018; International Publication No. WO 2019/079347 published Apr. 25, 2019; International Publication No. WO 2019/226953, published Nov. 28, 2019; U.S. Patent Publication No. 2018/0073012, published Mar. 15, 2018, which issued as U.S. Pat. No. 10,113,163, on Oct. 30, 2018; U.S. Patent Publication No. 2017/0121693, published May 4, 2017, which issued as U.S. Pat. No. 10,167,457 on Jan. 1, 2019; International Publication No. WO 2020/214842, published Oct. 22, 2020, and International Patent Application No. PCT/US2020/033873, filed May 20, 2020, the contents of each of which are incorporated herein by reference in their entireties.

[0012] To address the above-described deficiency in the art, a new phage-assisted continuous evolution (PACE) ABE selection system was developed and applied to enhance the compatibility of the deaminase domains of ABEs with other Cas homologs, such as newly developed variants of Cas9 derived from S. pyogenes, newly developed variants of Cas9 derived from S. aureus, those derived from Lachnospiraceae bacterium, such as LbCas12a, those derived from Acidaminococcus sp. BV3L6, such as AsCas12a, and those derived from Streptococcus macacae NCTC 11558, such as SmacCas9 and Spy-macCas9. The adenosine deaminases disclosed herein are compatible with a variety of Cas homologs, including small-sized, circularly permuted, and evolved Cas homologs. The adenosine deaminases disclosed herein are compatible with a variety of Cas variants or homologs that include, but are not limited to, SaCas9, SaCas9-KKH, LbCas12a, enAsCas12a, SpCas9-NG, and circularly permuted variants CP1028-SpCas9 and CP1041-SpCas9. The adenosine deaminases disclosed herein are compatible with a combination of Cas variants, such as Cas9-NG-CP1041 and Cas9-NG-VRQR.

[0013] PACE and phage-assisted non-continuous evolution (PANCE) were applied to the adenosine deaminase domain of ABE7.10 to enhance base editing activity. The variants evolved from these experiments exhibit broader Cas homolog compatibility than ABE7.10. TadA-8e, an exemplary variant emerging from these PACE and PANCE experiments, contains eight (8) additional substitutions relative to TadA7.10. These eight mutations are A109S, T111R, D119N, H122N, Y147D, F149Y, T1661, and D167N in the TadA7.10 sequence of SEQ ID NO: 315. ABE8e, the adenine base editor that comprises TadA-8e, shows increased editing efficiency relative to ABE7.10, while maintaining on-target:off-target editing ratios of ABE7.10. For instance, an on-target:off-target editing ratio of about 1300:1 was observed at the human EMX1 (homeobox protein) gene target, and an on-target:off-target editing ratio of about 90:1 was observed at the clinically relevant human HBG target, which is associated with sickle cell disease. The PACE-evolved ABE variants disclosed herein, including ABE8e, expand the targeting scope, editing efficiency, and overall utility of adenine base editors. ABE8e also has increased processivity compared to ABE7.10, which makes it useful for applications such as screening, disrupting regulatory regions, and multiplexed base editing.

[0014] Accordingly, in some aspects, the disclosure provides an adenosine deaminase comprising an amino acid sequence that comprises substitutions selected from T111X₁, D119X₂, and F149X₃, relative to the amino acid sequence of SEQ ID NO: 315, wherein X₁ is any amino acid other than T, X₂ is any amino acid other than D, and X₃ is any amino acid other than F. The adenosine deaminases may further comprise at least one substitution selected from R26X₄, V88X₅, A109X₆, H122X₇, T166X₈, and D167X₉, relative to the amino acid sequence of SEQ ID NO: 315, wherein X₄ is any amino acid other than R, X₅ is any amino acid other than V, X₆ is any amino acid other than A, X₇ is any amino acid other than H, X₈ is any amino acid other than T, and X₉ is any amino acid other than D. In some aspects, the disclosure provides adenosine deaminase that further comprises a Y167X₁₀ relative to the amino acid sequence of SEQ ID NO: 315, wherein X₁₀ is any amino acid other than Y. In particular embodiments, X₁₀ is D. In some aspects, the adenosine deaminases of the disclosure may further comprise at least one substitution selected from K20X₁₁, R21X₁₂, V82X₁₃, and V106X₁₃ relative to the amino acid sequence of SEQ ID NO: 315, wherein XII is any amino acid other than K, X₁₂ is any amino acid other than R, X₁₃ is any amino acid other than V, and X₁₄ is any amino acid other than V.

[0015] In some aspects, the present disclosure provides adenosine deaminases that comprise T111R, D119N, and F149Y substitutions, and further comprises at least one substitution selected from R26C, V88A, A109S, H122N, T1661, and D167N, in the amino acid sequence corresponding to TadA7.10 (SEQ ID NO: 315). In some embodiments, the disclosed adenosine deaminase comprises the substitutions A109S, T111R, D119N, H122N, Y147D, F149Y, T1661 and D167N in its amino acid sequence. In certain embodiments, the adenosine deaminases comprise the substitutions V106W, A109S, T111R, D119N, H122N, Y147D, F149Y, T1661, and D167N. In an exemplary embodiment, the adenosine deaminase is TadA-8e (SEQ ID NO: 433). In another exemplary embodiment, the adenosine deaminase is TadA-8e (V106W) (SEQ ID NO: 434). In exemplary embodiments, any of the disclosed adenosine deaminases is used in a base editor, as further provided herein. In some embodiments, the disclosed adenosine deaminases exhibit higher editing efficiencies when paired in a base editor with certain Cas9 variants, such as circularly permuted variants CP1041 and CP1028, than exhibited by the TadA7.10 deaminase.

[0016] In some aspects, the present disclosure provides adenine base editors comprising a nucleic acid programmable DNA binding protein (napDNAbp) domain and any of the adenosine deaminases disclosed herein. In some aspects, the napDNAbp domain comprises a Cas9 protein or variant thereof. In some aspects, the napDNAbp domain comprise a nickase (e.g., an nCas9).

[0017] In some embodiments, the base editor comprises a napDNAbp domain and an adenosine deaminase that comprises the substitutions T111R, D119N, and F149Y, and further comprises at least one substitution selected from the group consisting of R26C, V88A, A109S, H122N, T1661, and D167N, in the amino acid sequence corresponding to TadA7.10 (SEQ ID NO: 315). In some embodiments, the base editor comprises an adenosine deaminase that comprises the substitutions A109S, T111R, D119N, H122N, Y147D, F149Y, T1661, and D167N. In some embodiments, the base editor comprises an adenosine deaminase that comprises at least one substitution selected from the group consisting of K20A, R21A, V82G, and V106W. In exemplary embodiments, the base editor comprises ABE8e. In exemplary embodiments, the base editor comprises ABE8e-NRCH.

[0018] The adenine base editors (ABEs) provided herein may be capable of maintaining DNA editing efficiency, and in some embodiments demonstrate improved DNA editing efficiencies, relative to existing adenine base editors, such as ABE7.10. In some embodiments, the ABEs described herein exhibit reduced off-target editing effects while retaining high on-target editing efficiencies. In certain embodiments, the disclosed ABEs exhibit reduced Cas9-independent off-target editing effects while retaining high on-target editing efficiencies. In certain embodiments, the disclosed ABEs exhibit reduced off-target editing effects in RNA, such as cellular mRNA.

[0019] In some embodiments, the adenine base editors provided herein are capable of limiting formation of indels in a DNA substrate. In some embodiments, the ABEs provided herein have an expanded target window for editing a DNA substrate than canonical ABEs (e.g., a target window that corresponds to protospacer positions 4-11, 8-14, or 9-14 of the target sequence, wherein protospacer position 0 corresponds to a position relative to the transcription start site of the target gene).

[0020] In some aspects, the present disclosure provides compositions comprising the adenine base editors as described herein and one or more guide RNAs, e.g., a single-guide RNA (“sgRNA”). In addition, the disclosure provides for nucleic acid molecules encoding and/or expressing the adenine base editors as described herein, as well as expression vectors or constructs for expressing the adenine base editors described herein and a gRNA, host cells comprising said nucleic acid molecules and expression vectors, and one or more gRNAs, and compositions for delivering and/or administering nucleic acid-based embodiments described herein.

[0021] The present disclosure further provides complexes comprising the adenine base editors described herein and a gRNA associated with the Cas9 domain of the base editor, such as a single guide RNA. The guide RNA may be 15-100 nucleotides in length and comprise a sequence of at least 10, at least 15, or at least 20 contiguous nucleotides that is complementary to a target nucleotide sequence.

[0022] The present disclosure further provides methods of DNA editing that make use of the adenine base editors disclosed herein. These methods may induce (or yield, provide, or cause) an actual or average deamination frequency of 80%, 82%, 84%, 86%, 88%, 90%, 92.5%, 95%, or 98% when contacted with a DNA comprising a target sequence selected from the group consisting of AAA, AAT, AAC, AAG, TAA, TAT, TAC, TAG, CAA, CAT, CAC, CAG, GAA, GAT, GAC, and GAG. In some embodiments, these editing methods induce (yield, provide, or cause) an average deamination frequency of at least 75%, at least 80%, at least 84%, or at least 86%.

[0023] The disclosed methods of DNA editing may involve multiplexed base editing using any of the disclosed ABEs. Such methods may involve transducing (e.g., via transfection) cells with a plurality of complexes each comprising a base editor (e.g., an ABE comprising a Cas9 nickase (nCas9) domain and an adenosine deaminase domain) and a gRNA.

[0024] In certain embodiments of the disclosed methods, a nucleic acid construct (e.g., a plasmid or an mRNA construct) that encodes the ABE is transfected into the cell separately from the nucleic acid construct that encodes the gRNA molecule. In certain embodiments, these components are encoded on a single construct and transfected together. Accordingly, in some aspects, the disclosure provides polynucleotides and vectors encoding any of the adenine base editors, or domains thereof, described herein. The nucleic acid sequences may be codon-optimized for expression in the cells of any organism of interest (e.g., a human). In certain embodiments, the nucleic acid sequence is codon-optimized for expression in human cells.

[0025] In other embodiments, the methods disclosed herein involve the introduction into cells of a complex comprising an ABE and a gRNA molecule that has been expressed and cloned outside of these cells. In other embodiments, the methods disclosed herein involve the introduction into cells of an ABE and a gRNA using a lipid or polymer (such as a cationic lipid or cationic polymer).

[0026] It should be appreciated that any fusion protein, e.g., any of the base editors described herein, may be introduced into the cell in any suitable way, either stably or transiently. In some embodiments, a base editor may be transfected into the cell. In some embodiments, the cell may be transduced or transfected with a nucleic acid construct that encodes a base editor. For example, a cell may be transduced (e.g., with a virus encoding a base editor) with a nucleic acid that encodes a base editor, or the translated base editor. As an additional example, a cell may be transfected (e.g., with a plasmid encoding a base editor) with a nucleic acid that encodes a base editor or the translated base editor. Such transductions or transfections may be stable or transient. In some embodiments, cells expressing a base editor or containing a base editor may be transduced or transfected with one or more gRNA molecules, for example. In some embodiments, a plasmid expressing a base editor may be introduced into cells through electroporation (e.g., using an ATX MaxCyte electroporator), transient transfection (e.g., lipofection), stable genome integration (e.g., piggybac), viral transduction, or other methods known to those of skill in the art.

[0027] Methods are also provided for editing a target nucleic acid molecule, e.g., a single nucleobase within a genome, with an adenine base editor described herein, with reduced off-target effects, e.g., editing of cellular mRNA. In some embodiments, the disclosed DNA editing methods result in an average adenosine (A) to inosine (I) editing frequency in mRNA of 0.3% or less, 0.2% or less, 0.15% or less, or 0.1% or less when contacted with a DNA comprising a target sequence.

[0028] In some embodiments, the disclosed editing methods result in an actual or average off-target DNA editing frequency of less than 1.5%, less than 1.25%, less than 1.1%, less than 1%, less than 0.75%, less than 0.5%, less than 0.4%, less than 0.25%, less than 0.2%, less than 0.15%, or less than 0.1%. In some embodiments, the editing method results in less than 20%, 19%, 18%, 16%, 14%, 12%, 10%, 8%, 6%, 4%, 2%, 1%, 0.5%, 0.2%, or 0.1% indel formation in a nucleic acid (e.g., a DNA) comprising a target sequence. For example, the ABE8e (V106W) base editor may exhibit off-target editing frequencies of 0.32% or less while maintaining on-target editing efficiencies of about 80% or more, in target sequences in mammalian cells.

[0029] In certain embodiments, the editing methods described herein result in cutting (or nicking) one strand of the double-stranded DNA, for example, the strand that includes the adenine (A) of the target T:A nucleobase pair opposite the strand containing the target thymine (T) that is being excised. This nicking result serves to direct mismatch repair machinery to the non-edited strand, ensuring that the modified nucleotide is not interpreted as a lesion by the cell's machinery. This nick may be created by the use of a nickase napDNAbp domain in the base editor.

[0030] In other aspects, the disclosure provides kits for expressing and/or transducing host cells with an expression construct encoding the base editor and gRNA. It further provides kits for administration of expressed adenine base editors and expressed gRNA molecules to a host cell (such as a mammalian cell, e.g., a human cell). The disclosure further provides cells stably or transiently expressing the adenine base editor and gRNA, or a complex thereof. The disclosure further provides cells comprising vectors encoding any of the adenine base editors described herein.

[0031] In some embodiments, methods of treatment using the adenine base editors described herein are provided. The methods described herein may comprise treating a subject having or at risk of developing a disease, disorder, or condition associated with a G:C to A:T point mutation comprising administering to the subject an adenine base editor as described herein, a polynucleotide as described herein, a vector as described herein, or a pharmaceutical composition as described herein. In some embodiments, methods of treatment of hemoglobinopathies using the adenine base editors described herein are provided.

[0032] The disclosure provides a new phage-assisted continuous evolution (PACE) ABE selection system. Accordingly, in some aspects, the disclosure provides vector systems for performing directed evolution of one or more domains of an base editor (e.g., the adenosine deaminase domain) to engineer any of the disclosed adenine base editors. In some embodiments, the disclosed PACE vector systems comprise a selection plasmid comprising an expression construct encoding a base editor comprising an adenosine deaminase protein and a sequence encoding the N-terminal and C-terminal portions of a split intein (e.g., an Npu split intein), and three accessory plasmids. In some embodiments, the PACE vector systems comprise, in addition to a selection plasmid, one or more accessory plasmids. In some embodiments, the one or more accessory plasmids comprise (1) a first accessory plasmid comprising an isolated nucleic acid comprising an expression construct comprising a sequence encoding a M13 phage gIII protein signal peptide operably controlled by a T7 RNA promoter, wherein the sequence encoding the gIII protein signal peptide lacks one or more nucleic acid bases of the signal peptide domain; (2) a second accessory plasmid encoding the C-terminal portion of a split intein and a sequence encoding a dCas9; and (3) a third accessory plasmid comprising a sequence encoding a T7 RNA polymerase (RNAP) comprising mutations that give rise to two stop codons that can be corrected upon successful base editing.

[0033] The details of one or more embodiments of the invention are set forth herein. Other features, objects, and advantages of the invention will be apparent from the Detailed Description, Examples, Figures, and Claims. References cited in this application are incorporated herein by reference in their entireties.

### BRIEF DESCRIPTIONS OF THE DRAWINGS

[0034] FIGS. 1A-1D show the phage-assisted evolution of a deoxyadenosine deaminase. FIG. 1A is a schematic of a general PACE overview for base editor evolution^{12, 13}. E. coli host cells contain a plasmid-based genetic circuit that links expression of gene III (gIII, encoding pIII) to the activity of the base editor encoded in a modified M13 bacteriophage. The production of infectious progeny phage requires expression of gene III, which only occurs in host cells infected by phage variants that encode active base editors. Phage exist in a fixed-volume vessel (the lagoon) continuously diluted with host-cell culture, so only those phage that propagate faster than the rate of dilution can persist and evolve. FIG. 1B is a schematic of the selection circuit in PANCE or PACE for evolving the deoxyadenosine deaminase component of ABEs. Plasmid P1 contains gene III driven by a T7 promoter and a sgRNA driven by a Lac promoter. Plasmid P2 expresses catalytically dead Cas9 (dCas9) fused to an N-intein, which forms full-length base editor upon trans-intein splicing with TadA fused to a C-intein (encoded on the SP). Plasmid P3 expresses a T7 RNAP that contains two stop codons that can be corrected to arginine and glutamine upon adenine base editing; this editing event drives expression of gene III. Eight P3 variants (P3a-h) were developed with different promoters and ribosome binding sites (RBS) to tune the stringency of PANCE/PACE. The phage genome is continuously mutated by expression of mutagenic genes from the mutagenesis plasmid (MP). FIG. 1C shows that T7 RNA polymerase (T7 RNAP), which is required for gene III expression from the T7 promoter, contains two stop codons through GC-to-AT mutations at R57 and Q58. Deamination of both adenines by ABE converts the stop codons back to Arg and Gln, resulting in active T7 RNAP and gene III expression. FIG. 1D is a graph showing overnight phage propagation assays to test the activity of different phage pools in host cells harboring P1, P2, and eight different variants of P3 (P3a-h) of increasing stringency. Phage pools were mixed with an excess of log-phase host cells, and the phage were allowed to propagate overnight. To calculate the fold phage propagation, the output phage titer was divided by the input titer. For all plots, dots represent individual biological replicates, bars represent mean values, and error bars represent the standard deviation of three independent biological replicates.

[0035] FIGS. 2A-2G show the mutations and kinetics of TadA-8e, as well as the editing characteristics of ABE8e in human cells. FIG. 2A shows the conserved mutations after 25 passages of PANCE (PANCE round 1=passages 1-15; and PANCE round 2=passages 11-25), and genotypes of five TadA variants emerging from 84 hours of PACE (surviving ˜10¹⁷⁴-fold total dilution). For a list of all evolved TadA genotypes, see FIG. 20. FIG. 2B shows E. coli TadA deaminase (left shaded area, PDB 1Z3A) aligned with the structure of S. aureus TadA (not shown) complexed with tRNAA^{rg2} (right shaded area/grey, PDB 2B3J). Mutations evolved during PANCE and PACE are colored to correspond to those in FIG. 20. FIG. 2C shows the architecture of ABE7.10 (ABEmax)¹⁶ and ABE8e. FIG. 2D shows, on the left, representative denaturing polyacrylamide gels of 5′-radiolabeled dsDNA deamination reactions performed with in vitro reconstituted ABE7.10 and ABE8e ribonucleoproteins (RNPs), followed by treatment with EndoV nuclease, which cleaves DNA 3′ of deoxyinosine. FIG. 2D shows, on the right, the fraction of deaminated dsDNA plotted as a function of time in hours or in minutes. The data were fit to a single exponential rate to extract apparent deamination first-order rate constants for ABE7.10 and ABE8e. Data are represented as the mean±s.d. from three independent experiments. FIG. 2E shows base editing in HEK293T cells by SpABE7.10 versus SpABE8e, SaABE7.10 versus SaABE8e, and LbABE7.10 and enAsABE7.10 versus LbABE8e and enAsABE8e base editors, for the two nucleotides with the highest editing efficiency within each protospacer. Bars represent mean values and error bars represent the standard deviation of three independent biological replicates. For editing across the entire protospacer for each site and indel frequencies, see FIGS. 9A-11B. FIG. 2F shows base editing in HEK293T cells by NG-ABE7.10 versus NG-ABE8e and SaKKH-ABE7.10 versus SaKKH-ABE8e, for the two nucleotides with the highest editing within each protospacer. For editing efficiencies across the entire protospacer and indel frequencies, see FIGS. 12A-13B. FIG. 2G shows base editing in HEK293T cells within the protospacer by CP-ABE7.10 and CP-ABE8e variants, compared to SpABE7.10 and SpABE8e. For editing efficiencies across the entire protospacer and indel frequencies, see FIGS. 9A-9B. For all plots, bars represent mean values, and error bars represent the standard deviation of three independent biological replicates.

[0036] FIGS. 3A-3E show an off-target analysis of ABE8e. FIG. 3A shows a DNA off-target analysis comparing ABE7.10 plasmid delivery, ABE8e plasmid delivery, and ABE8e RNP delivery at site 5 (HBG), site 6 (VEGFA3), and EMX1. Editing efficiencies and on-target:off-target editing ratios are shown. FIG. 3B shows an off-target transcriptome-wide A-to-I conversion analysis in cellular RNA. FIG. 3C shows DNA editing comparing ABE7.10, ABE8e, and ABE8e(TadA-8e V106W) at seven genomic sites in HEK293T cells. FIG. 3D shows an othogonal R-loop assay overview. FIG. 3E shows Cas9-independent off-target A•T to G•C editing frequencies detected by the orthogonal R-loop assay at each R-loop site with dSaCas9 and a SaCas9 sgRNA. Each R-loop was performed by co-transfection of ABE7.10, ABE8e, or ABE8e (TadA-8e V106W), and a SpCas9 sgRNA targeting site 3 with dSaCas9 and a SaCas9 sgRNA targeting R-loops 1-5, respectively. For all plots, bars represent mean values, and error bars represent the standard deviation of three independent biological replicates.

[0037] FIGS. 4A and 4B show adenine base editing with ABE8e at disease-relevant loci in human cells. FIG. 4A shows base editing efficiency and indel frequencies in HEK293T cells at a GATA1 binding site of the BCL11A enhancer by ABE7.10 and ABE8e. Editing efficiencies at each adenine in the protospacer individually and efficiencies of editing both adenines within the same allele. FIG. 4B shows base editing efficiencies and indel frequencies in HEK293T cells of the HBG1/2 promoter with ABE7.10 and ABE8e. Data are shown for each sgRNA provided individually, and for dual (multiplexed) editing of both target sites within a single allele when both sgRNAs are provided simultaneously. Protospacers are named based on the position of the target adenine relative to the HBG transcription start site. PAM sequences are indicated in boxes. For all plots, bars represent mean values and error bars represent the standard deviation of three independent biological replicates.

[0038] FIG. 5 shows a PACE schedule for deoxyadenosine deaminase evolution. Lagoon L1 contains host cells harboring P1, P2, and P3e. Lagoons L2 and L3 contain host cells harboring P1, P2, and P3g, which form a more stringent selection circuit than the circuit in lagoon L1. For details on plasmids, see FIG. 18. The stringency of the ABE selection was further modulated by increasing the lagoon flow rate (dashed lines). For the first 12 hours, gene III was expressed by the addition of anhydrotetracycline to enable genetic drift in the absence of selection pressure^{12, 13}.

[0039] FIGS. 6A and 6B show base editing efficiencies and indel frequencies for SpABE7.10 and SpABE8a-e variants at four genomic sites in HEK293T cells. FIG. 6A shows base editing with SpABE7.10, SpABE8a, SpABE8b, SpABE8c, SpABE8d, and SpABE8e at four genomic sites in HEK293T cells. PAM sequences are indicated in boxes. FIG. 6B shows the percent of all sequencing reads containing an indel following modification by SpABE7.10, SpABE8a, SpABE8b, SpABE8c, SpABE8d, or SpABE8e at four genomic sites in HEK293T cells. All base editors are optimized with the architecture, codon usage, and nuclear localization signals of ABEmax¹⁶. All untreated controls show no editing or indel formation at all sites. For all plots, dots represent individual biological replicates, and bars represent mean±s.d. of three independent biological replicates.

[0040] FIGS. 7A and 7B show base editing efficiencies and indel frequencies for SaABE7.10 and SaABE8a-e variants at four genomic sites in HEK293T cells. FIG. 7A shows base editing with SaABE7.10, SaABE8a, SaABE8b, SaABE8c, SaABE8d, and SaABE8e at four genomic sites in HEK293T cells. PAM sequences for SaCas9 are indicated in boxes. FIG. 7B shows a percent of all sequencing reads containing an indel following modification by SaABE7.10, SaABE8a, SaABE8b, SaABE8c, SaABE8d, or SaABE8e at four genomic sites in HEK293T cells. All base editors are optimized with the architecture, codon usage, and nuclear localization signals of ABEmax¹⁶. All untreated controls show no editing or indel formation at all sites. For all plots, dots represent individual biological replicates and bars represent mean±s.d. of three independent biological replicates.

[0041] FIGS. 8A and 8B show base editing efficiencies and indel frequencies for LbABE7.10 and LbABE8a-e variants at three genomic sites in HEK293T cells. FIG. 8A shows base editing with LbABE7.10, LbABE8a, LbABE8b, LbABE8c, LbABE8d, and LbABE8e at three genomic sites in HEK293T cells. PAM sequences for LbCas12a are indicated in boxes. FIG. 8B shows a percent of all sequencing reads containing an indel following modification by LbABE7.10, LbABE8a, LbABE8b, LbABE8c, LbABE8d, or LbABE8e at three genomic sites in HEK293T cells. LbCas12a was used in the nuclease inactive form since the desired nickase enzyme for base editing has not been reported. All base editors are optimized with the architecture, codon usage, and nuclear localization signals of ABEmax¹⁶. All untreated controls show no editing or indel formation at all sites. For all plots, dots represent individual biological replicates, and bars represent mean±s.d. of three independent biological replicates.

[0042] FIGS. 9A and 9B show base editing efficiencies and indel frequencies for SpABE7.10, SpABE8e, CP1028-ABE7.10, CP1028-ABE8e, CP1028-ABE8e-dimer, CP1041-ABE7.10, CP1041-ABE8e, and CP1041-ABE8e-dimer at seven genomic sites in HEK293T cells. FIG. 9A shows base editing with SpABE7.10, SpABE8e, CP1028-ABE7.10, CP1028-ABE8e, CP1028-ABE8e-dimer, CP1041-ABE7.10, CP1041-ABE8e, and CP1041-ABE8e-dimer at seven genomic sites in HEK293T cells. FIG. 9B shows a percent of all sequencing reads containing an indel following modification by SpABE7.10, SpABE8e, CP1028-ABE7.10, CP1028-ABE8e, CP1028-ABE8e-dimer, CP1041-ABE7.10, CP1041-ABE8e, or CP1041-ABE8e-dimer at seven genomic sites in HEK293T cells. For all plots, dots represent individual biological replicates, and bars represent mean±s.d. of three independent biological replicates.

[0043] FIGS. 10A and 10B show base editing efficiencies and indel frequencies for SaABE7.10, SaABE8e, SaABE8e-dimer, SaKKH-ABE7.10, SaKKH-ABE8e, and SaKKH-ABE8e-dimer in HEK293T cells at five genomic sites with NNGRRT PAMs in HEK293T cells. FIG. 10A shows base editing with SaABE7.10, SaABE8e, SaABE8e-dimer, SaKKH-ABE7.10, SaKKH-ABE8e, and SaKKH-ABE8e-dimer in HEK293T cells at five genomic sites with NNGRRT PAMs in HEK293T cells. PAM sequences for SaCas9 are indicated in boxes. FIG. 10B shows a percent of all sequencing reads containing an indel following modification by SaABE7.10, SaABE8e, SaABE8e-dimer, SaKKH-ABE7.10, SaKKH-ABE8e, and SaKKH-ABE8e-dimer at five genomic sites in HEK293T cells. For all plots, dots represent individual biological replicates, and bars represent mean±s.d. of three independent biological replicates.

[0044] FIGS. 11A and 11B show base editing efficiencies and indel frequencies for LbABE7.10, LbABE8e, Lb-ABE8e-dimer, enAsABE7.10, enAsABE8e, and enAsABE8e-dimer in HEK293T cells at three genomic sites in HEK293T cells. FIG. 11A shows base editing with LbABE7.10, LbABE8e, LbABE8e-dimer, enAsABE7.10, enAsABE8e, and enAsABE8e-dimer in HEK293T cells at three genomic sites in HEK293T cells. PAM sequences for LbCas12a are indicated in boxes. FIG. 11B shows a percent of all sequencing reads containing an indel following modification by LbABE7.10, LbABE8e, LbABE8e-dimer, enAsABE7.10, enAsABE8e, and enAsABE8e-dimer at three genomic sites in HEK293T cells. For all plots, dots represent individual biological replicates, and bars represent mean±s.d. of three independent biological replicates.

[0045] FIGS. 12A and 12B show base editing efficiencies and indel frequencies for NG-ABE7.10, NG-ABE8e, and NG-ABE8e-dimer in HEK293T cells at five genomic sites in HEK293T cells. FIG. 12A shows base editing with NG-ABE7.10, NG-ABE8e, and NG-ABE8e-dimer in HEK293T cells at five genomic sites in HEK293T cells. FIG. 12B shows a percent of all sequencing reads containing an indel following modification by NG-ABE7.10, NG-ABE8e, and NG-ABE8e-dimer at five genomic sites in HEK293T cells. For all plots, dots represent individual biological replicates and bars represent mean±s.d. of three independent biological replicates.

[0046] FIGS. 13A and 13B show base editing efficiencies and indel frequencies for SaABE7.10, SaABE8e, SaABE8e-dimer, SaKKH-ABE7.10, SaKKH-ABE8e, and SaKKH-ABE8e-dimer in HEK293T cells at nine genomic sites with NNHRRT PAMs in HEK293T cells. FIG. 13A shows base editing with SaABE7.10, SaABE8e, SaABE8e-dimer, SaKKH-ABE7.10, SaKKH-ABE8e, and SaKKH-ABE8e-dimer in HEK293T cells at nine genomic sites with NNHRRT PAMs in HEK293T cells. PAM sequences for SaCas9 are indicated in boxes. FIG. 13B shows a percent of all sequencing reads containing an indel following modification by SaABE7.10, SaABE8e, SaABE8e-dimer, SaKKH-ABE7.10, SaKKH-ABE8e, and SaKKH-ABE8e-dimer at nine genomic sites in HEK293T cells. For all plots, dots represent individual biological replicates and bars represent mean±s.d. of three independent biological replicates.

[0047] FIG. 14 shows a processivity analysis for ABE7.10 and ABE8e. Percent of all sequenced alleles in which the two target As in the editing window are both converted to Gs, following transfection with plasmids expressing ABE7.10 or ABE8e at three genomic sites in HEK293T cells. Analyses were done using the Python script provided in Example 4, Supplementary Note 1, which is outlined below. Dots represent individual values and bars represent mean±s.d. of three independent biological replicates.

[0048] FIG. 15 shows a comparison of ABE8e and Cas9 nuclease at the top three gRNA-dependent off-target sites for EMX1 as identified by GUIDE-Seq⁴⁴.

[0049] FIG. 16 shows allele compositions following treatment with ABE7.10 or ABE8e at a GATA1 binding site of the BCL11A enhancer. Due to increased processivity and overall efficiency, an increased percentage of alleles simultaneously containing A•T-to-G•C editing at positions four and seven was observed after treatment with ABE8e compared to ABE7.10. Multiple edits were predicted to more effectively disrupt the GATA1 binding site compared to single edits⁴⁹. The data shown is representative of three biological replicates.

[0050] FIG. 17 shows allele compositions following treatment with ABE7.10 or ABE8e at the HBG1 and HBG2 promoters. The data shown is representative of three biological replicates. The target sites at −175T and −198T in the promoters are indicated.

[0051] FIG. 18 is a table showing the plasmid-based genetic circuit components for the PACE experiments.

[0052] FIG. 19 is a table showing the selection schedule for PANCE. For the first phase of PANCE (PANCE 1), two selections were performed in parallel using host cells harboring P1, P2, and either P3a or P3b. For the second phase of PANCE (PANCE 2), four selections were performed in parallel, two in host cells harboring P1, P2, and P3e, and two in host cells harboring P1, P2, and P3g. For details on plasmids, see FIG. 18. Following the final passage of PANCE 2 (25 total passages), all phage were pooled and used as the starting point for PACE.

[0053] FIG. 20 shows a mutation table of variants from PANCE and PACE. Data were obtained by sequencing individual plaques. Conserved mutations are bolded. Mutations that are highlighted in the structure in FIG. 2B are highlighted to match the amino acid positions in the structure. PACE, Pool 2, Variants 1, 4, 6, and 7, and PACE, Pool 3, Variant 6 were tested for base editing activity in mammalian cells.

[0054] FIG. 21 is a table showing protospacer sequences for mammalian genomic sites targeted in Examples 1-4.

[0055] FIGS. 22A and 22B show a table of primers used in the mammalian cell genomic DNA amplification of Examples 1-4. The table is continued across FIGS. 22A-22B.

[0056] FIGS. 23A-23F show a table of amplicons used in the high-throughput sequencing analyses of Examples 1-4. The table is continued across FIGS. 23A-23F.

[0057] FIG. 24 shows titration data at eight editor doses comparing base editing efficiencies for ABE8e and ABE8e-dimer at three sites in HEK293T cells. Base editing with ABE8e and ABE8e-dimer in HEK293T cells at three genomic sites in HEK293T cells. Transfections were performed with a constant amount of sgRNA plasmid but eight varying doses of ABE plasmid. For all plots, dots represent individual biological replicates, and bars represent mean±s.d. of three independent biological replicates. Editing patterns are indicated on the plot with symbols (>, *).

[0058] FIG. 25 shows on-target DNA base editing efficiencies comparing ABE8e mutants with minimized transcriptome-wide RNA off-target editing. Base editing with Cas9(D10A), ABE7.10, ABE8e, ABE8e(TadA-8e V106W), ABE8e(TadA-8e V82G), and ABE8e(TadA-8e K20A R21A) at the LDLR locus in HEK293T cells⁴⁷. Editing was analyzed from RNAseq analysis. All base editors are optimized with the architecture, codon usage, and nuclear localization signals of ABEmax¹⁶. For all plots, dots represent individual biological replicates, and bars represent mean±s.d. of three independent biological replicates. The PAM sequence is indicated in a box.

[0059] FIGS. 26A and 26B show on-target base editing efficiencies and indel frequencies for ABE7.10, ABE8e, and ABE8e(TadA-8e V106W) in HEK293T cells at seven genomic sites in HEK293T cells. FIG. 26A shows base editing with ABE7.10, ABE8e, and ABE8e(TadA-8e V106W) in HEK293T cells at seven genomic sites in HEK293T cells. FIG. 26B shows the percent of all sequencing reads containing an indel following modification by ABE7.10, ABE8e, and ABE8e(TadA-8e V106W) at seven genomic sites in HEK293T cells. All untreated controls show no editing or indel formation at all sites. For all plots, dots represent individual biological replicates, and bars represent mean±s.d. of three independent biological replicates.

[0060] FIG. 27 shows on-target base editing efficiencies and indel frequencies for ABE7.10, ABE8e, and ABE8e(TadA-8e V106W) in HEK293T cells at site 3 in HEK293T cells for the orthogonal R-loop assay. Base editing with ABE7.10, ABE8e, and ABE8e (TadA-8e V106W) in HEK293T cells at site 3. For all plots, dots represent individual biological replicates, and bars represent mean±s.d. of three independent biological replicates. The PAM sequence is boxed.

[0061] FIG. 28 depicts an alignment of the amino acid sequences of TadA deaminases derived from various species and TadA-8e (derived from E. coli) with the consensus E. coli TadA sequence.

[0062] FIGS. 29A and 29B show a TadA-8e V106W target editing analysis for SaCas9 and LbCas12a. FIG. 29A is a graph of DNA editing comparing SaABE7.10, SaABE8e, and SaABE8e (TadA-8e V106W) at seven genomic sites in HEK293T cells. FIG. 29B is a graph of DNA editing comparing LbABE7.10, LbABE8e, and LbABE8e (TadA-8e V106W) at seven genomic sites in HEK293T cells.

[0063] FIGS. 30A-30H show that adenine base editing converts the sickle cell disease β-globin allele (HBB^{S}) to the benign Makassar variant (HBB^{G}) in patient CD34+ hematopoietic stem and progenitor cells (HSPCs). CD34+ cells from three SCD patient donors were electroporated with ABE8e-NRCH mRNA or RNP using a single guide RNA (sgRNA) targeting the SCD mutant codon. FIG. 30A: The amino acid and nucleotide sequence of the edited region, with the target adenosine (A7) and potential bystander edits (A9, A12, A16) indicated with underline, with amino acid changes indicated. Bystander editing at A9 and A12 results in synonymous mutations. The protospacer and the 5′-CACC-3′ PAM are underlined. Nucleotides are numbered starting at the 5′ end of the protospacer. FIG. 30B: Editing efficiencies at all target and bystander nucleotides, and indels, as measured by high-throughput DNA sequencing (HTS) after 6 days of in stem cell culture media following electroporation. FIG. 30C: Proportion of β-like globin proteins quantified by reverse-phase high performance liquid chromatography (RP-HPLC) of reticulocyte lysates after 18 days of culture in differentiation media following electroporation. FIG. 30D: Representative phase contrast images of reticulocytes incubated for 8 hours in 2% 02. An unedited reticulocyte population derived from healthy donor (HBBA/A) CD34+ HSPCs was included for comparison alongside those derived from unedited, mRNA-edited and RNP-edited SCD HBB^{S/S} CD34+ HSPCs. Scale bar=50 μm. FIG. 30E: Quantification of sickled reticulocytes calculated by counting images after incubation for 8 hours in 2% 02 such as in FIG. 30D. More than 300 randomly selected cells per sample were counted by a blinded observer. FIG. 30F: Venn diagram showing candidate off-target sites nominated by the algorithms Cas-OFFinder and CIRCLE-seq, and nominated sites for which off-target editing was observed by targeted DNA sequencing in CD34+ cells from three SCD patient donors electroporated with ABE8e-NRCH mRNA. FIG. 30G: Pie chart showing the fraction of validated off-target sites according to their predicted genomic annotation using HOMER. TSS, transcription start site, defined as nucleotides 1 kb upstream to 100 bp downstream of transcription start site; TTS, transcription termination site, defined as nucleotides 100 bp upstream to 1 kb downstream of the transcription termination site. FIG. 30H: Histogram showing the number of validated base editing off-target sites according to the frequency of reads with one or more A•T to G•C conversions. Bar graphs in FIGS. 30B, 30C, and 30E show mean values±standard deviation of three independent biological replicates, with individual values shown as dots.

[0064] FIGS. 31A-31H show that engraftment of ABE8e-NRCH mRNA-treated SCD patient CD34+ HSPCs after transplantation into immunodeficient mice. CD34+ HSPCs from three HBB^{S/S} SCD patient donors were electroporated with ABE8e-NRCH mRNA and a single guide RNA (sgRNA) targeting the SCD mutant codon, followed by transplantation of 2-5×10⁵ treated cells into NBSGW mice via tail-vein injection. Mice were sacrificed and analyzed 16 weeks after transplantation. FIG. 31A: Experimental workflow. FIG. 31B: Engraftment measured by the percentage of human donor CD45+ cells (hCD45+ cells) in recipient mouse bone marrow. FIG. 31C: Human B-cells (hCD19+), myeloid cells (hCD33+), and T-cells (hCD3+) cells in recipient mouse bone marrow, shown as percentages of the total hCD45+ population. FIG. 31D: Human erythroid precursors (hCD235a+) in recipient mouse bone marrow shown as percentage of total human and mouse CD45− cells. FIG. 31E: On-target editing efficiencies in human donor CD34+ cell-derived lineages purified from recipient bone marrow by fluorescence-activated cell sorting. Erythroid, myeloid, B-cell, and HSPC human lineages were collected using antibodies that recognize hCD235a, hCD33, hCD19, and hCD34+, respectively. Statistical significance was assessed by one-way ANOVA to compare groups; “ns”, not significant. Cell types are indicated in the legend with symbols (>, *, \hat{ }). FIG. 31F: Percentages of β-like globin proteins determined by reverse-phase HPLC analysis of human donor-derived reticulocytes isolated from recipient mouse bone marrow. FIG. 31G: Representative phase contrast images of human reticulocytes purified from bone marrow and incubated for 8 hours in 2% 02. Scale bar=25 μm. FIG. 31H: Quantification of sickled cells calculated by counting images after incubation for 8 hours in 2% 02 as in FIG. 31G. More than 300 randomly selected cells per sample were counted by a blinded observer. n=14 total mice analyzed in FIGS. 31B-31F; triangle, square, and circle symbols represent samples from three different SCD CD34+ HSPC donors. Graphs show mean values±standard deviation. Statistical significance between treated and untreated samples was assessed by a two-tailed Student's t-test; “ns”, not significant.

[0065] FIGS. 32A-32H show that adenine base editing of the sickle cell disease β-globin allele (HBB^{S}) to the benign Makassar variant (HBB^{G}) alleviates hematologic pathology in a mouse model of SCD. FIG. 32A: Diagram detailing the experimental workflow. Lineage negative (Lin⁻) HSPCs were isolated from the bone marrow of Townes SCD mice (CD45.2, HBB^{S}/HBB^{S}), electroporated with ABE8e-NRCH and sgRNA ribonucleoprotein complex (RNP) or mock electroporated with no base editor as a control, then transplanted into irradiated congenic CD45.1 C57B1/6 recipient mice. Peripheral blood was analyzed serially at 6, 10, 14, and 16 weeks after transplantation to determine the fraction of engrafted donor cells and hemoglobin content. Mice were sacrificed for necropsy at 16 weeks. As a control for healthy RBCs, unedited HBB^{S/A} (sickle cell trait) HSPCs were transplanted into irradiated congenic CD45.1 C57B1/6 recipient mice. FIG. 32B: Donor cell engraftment measured by flow cytometry assessing CD45.1 expression on peripheral blood mononuclear cells (PBMCs). Editing patterns are indicated on the plot with symbols (>, *, \hat{ }) FIG. 32C: HBB^{S}-to-HBB^{G} editing efficiency measured by HTS of genomic DNA in cells cultured 3 days after electroporation (pre-transplantation) or in PBMCs collected at 16 weeks (after transplantation). Statistical significance was assessed by a two-tailed Student's t-test, “ns” not significant. FIG. 32D: The percentages of PG globin protein in blood measured by reverse-phase HPLC at each blood draw. Editing patterns are indicated on the plot with symbols (>, *, \hat{ }). FIGS. 32E-32H: Hematologic properties measured using a veterinary blood analyzer instrument. Blood from non-transplanted HBB^{A/S} Townes mice were also measured as a healthy, non-transplanted animal control. Statistical significance between groups of mice were assessed using one-way ANOVA, with Sidák's multiple comparisons test of the edited HBB^{S/S} values compared to each other group to calculate p-values. No statistically significant differences were observed between edited HBBS/S and either transplanted or non-transplanted HBB^{A/S} mice. FIG. 32E: Blood hemoglobin levels. FIG. 32F: White blood cell count. FIG. 32G: Red blood cell count. FIG. 32H: Reticulocytes as a percentage of total cells in blood. Error bars indicate standard deviation. Unedited HBB^{S/S}: n=6 mice. Edited HBB^{S/S}: n=6 mice. HBB^{A/S}: n=2 mice. HBB^{A/S} not transplanted: n=5 mice.

[0066] FIGS. 33A-33F show that adenine base editing of the sickle cell disease β-globin allele (HBB^{S}) to the Makassar variant (HBB^{G}) reduces erythrocyte sickling and splenic pathologies in mice. Mice were treated as described in FIG. 32A. Blood and spleen were analyzed sixteen weeks after transplantation of edited Lin− HSPCs. FIG. 33A: Representative images of blood smears. Scale bar=25 μm FIG. 33B: Representative phase contrast images of peripheral blood incubated for 8 hours in 2% 02. Scale bar=50 μm FIG. 33C: Quantification of sickled cells. More than 300 randomly selected cells were counted by a blinded observer. FIG. 33D: Mass of dissected spleens. FIG. 33E: Representative images of spleens isolated from mice transplanted with Lin− HSPCs of the indicated genotype, with a ruler at top for scale. FIG. 33F: Histological sections of spleens of recipient mice 16 weeks after transplantation. Splenic pathologies in mice that received unedited donor HBB^{S/S} HSCs include excessive extramedullary erythropoiesis evidenced by increased red pulp (RP) and vascular congestion indicated by RBC pooling (arrows). White pulp (WP), indicated by dotted lines, appears darker staining than red pulp. Images were taken at 10× magnification and were processed, stained and photographed at the same time under identical conditions. Scale bar=100 μm. Unedited HBB^{S/S}: n=6 mice; edited HBB^{S/S}: n=6 mice; HBB^{A/S}: n=2 mice. Graphs show mean values±standard deviation, with individual values shown as dots. Statistical significance was assessed using one-way ANOVA, with Sidák's multiple comparisons test of the edited HBB^{S/S} values compared to each other group to calculate p-values.

[0067] FIG. 34 shows optimization of HBB^{S}-to-HBB^{G} base editing in HEK293T cells. Plasmids encoding the HBB^{S}-targeting sgRNA and either ABE7.10-NRCH or ABE8e-NRCH were transfected by lipofection into HEK293T cells. Editing efficiency was measured after 3 days by high-throughput DNA sequencing (HTS).

[0068] FIG. 35 shows cell viability and recovery of CD34+ HSPCs after electroporation. Two days after electroporation of base editor mRNA and sgRNA, or electroporation of ribonucleoprotein (RNP), cell number and viability were measured using a Chemometec Nucleocounter-3000. Acridine orange was used to stain the total cell number and DAPI was used to stain dead, permeabilized cells. The percent viability was calculated as the DAPI stained cells divided by the acridine orange cells within each sample. The percent recovery was normalized to the cell count of the unedited sample. Unedited cells were not electroporated. Error bars show standard deviation, n=3.

[0069] FIG. 36 shows erythroid differentiation of edited CD34+ HSPCs. Representative, immuno-flow cytometry for erythroid maturation stage markers at culture days 7 and 14. Top: gating strategy to identify single cells expressing the erythroid marker hCD235a. Bottom: gating strategy to track the progress of erythroid maturation based on expression of CD49D and Band3 in hCD235a+ cells. SSC-A: Side scatter area. SSC-W: Side scatter width. FSC-A: Forward scatter area.

[0070] FIG. 37 shows the results of reverse-phase high performance liquid chromatography (HPLC) analysis of erythroid cells derived from edited CD34+ HSPCs. Representative reverse-phase HPLC chromatograms of erythroid cell lysates at culture day 18, with β-like globins and their associated fractions marked near the associated peak.

[0071] FIGS. 38A and 38B show the extent of off-target base editing associated with ABE8e-NRCH conversion of HBB^{S} to HBB^{G} Makassar in sickle cell disease patient CD34+ hematopoietic stem and progenitor cells. FIG. 38A: CIRCLE-seq read counts obtained for each verified off-target site and the alignment of each site to the guide sequence. FIG. 38B: Bar graph showing the percentage of sequencing reads containing A:G to G:C edited alleles at on-and off-target sites in genomic DNA samples from patient CD34+ HSPCs treated with ABE8e-NRCH mRNA, ribonucleoprotein (RNP), or untreated controls (n=4). Asterisks (*) indicate sites that were identified by both Cas-OFFinder and CIRCLE-seq methods. Each triplet of bars represents, from top to bottom, mRNA delivery, RNP delivery, and control.

[0072] FIG. 39 show the extent of off-target indel formation associated with ABE8e-NRCH-mediated conversion of HBB^{S} to HBB^{G} Makassar in sickle cell disease patient CD34+ hematopoietic stem and progenitor cells. Bar graphs show the percentage of sequencing reads containing alleles harboring indels at on-and off-target sites in genomic DNA samples from patient CD34+ HSPCs treated with ABE8e-NRCH mRNA, ribonucleoprotein (RNP), or untreated controls (n=4). Asterisks (*) indicate sites that were identified by both Cas-OFFinder and CIRCLE-seq methods. Each triplet of bars represents, from top to bottom, mRNA delivery, RNP delivery, and control.

[0073] FIGS. 40A-40H show engraftment of ABE8e-NRCH RNP-treated SCD patient CD34+ HSPCs after transplantation into immunodeficient mice. CD34+ HSPCs from three HBB^{S/S} SCD patient donors were electroporated with ABE8e-NRCH RNP using a single guide RNA (sgRNA) targeting the SCD mutant codon, followed by transplantation of 2-5×10⁵ treated cells into NBSGW mice via tail-vein injection. Mice were sacrificed and analyzed 16 weeks after transplantation. FIG. 40A: Experimental workflow. FIG. 40B: Engraftment measured by the percentage of human donor CD45+ cells (hCD45+ cells) in recipient mouse bone marrow. FIG. 40C: Human B-cells (hCD19+), myeloid cells (hCD33+), and T-cells (hCD3+) cells in recipient mouse bone marrow, shown as percentages of the total hCD45+ population. FIG. 40D: Human erythroid precursors (hCD235a+) in recipient mouse bone marrow shown as percentage of total human and mouse CD45− cells. FIG. 40E: On-target (A7, FIG. 30A) editing efficiencies in human donor CD34+ cell-derived lineages purified from recipient bone marrow by fluorescence-activated cell sorting. Erythroid, myeloid, B-cell, and HSPC human lineages were collected using antibodies that recognize hCD235a, hCD33, hCD19, and hCD34+, respectively. Statistical significance was assessed by one-way ANOVA to compare groups; “ns”, not significant. Cell types are indicated in the legend with symbols (>, *, \hat{ }). FIG. 40F: Percentages of β-like globin proteins determined by reverse-phase HPLC analysis of human donor-derived reticulocytes isolated from recipient mouse bone marrow. FIG. 40G: Representative phase contrast images of human reticulocytes purified from bone marrow and incubated for 8 hours in 2% 02. Scale bar=25 μm. FIG. 40H: Quantification of sickled cells calculated by counting images after incubation for 8 hours in 2% 02 such as in FIG. 40G. More than 300 randomly selected cells per sample were counted by a blinded observer. n=14 total mice analyzed in FIGS. 40B-40F; triangle, square, and circle symbols represent samples from three different SCD CD34+ HSPC donors. Graphs show mean values±standard deviation. Statistical significance between treated and untreated samples was assessed by a two-tailed Student's t-test; “ns”, not significant.

[0074] FIG. 41 shows a flow cytometry analysis of human CD34+ donor-derived hematopoietic cells after transplantation into NBSGW mice. Flow cytometry gating strategies for transplantation studies. Recipient mice were sacrificed at 16 weeks. Human donor cell-derived lineages in recipient bone marrow were identified by immune-flow cytometry using the indicated human (h) hematopoietic cell-specific antibodies.

[0075] FIG. 42 shows a flow cytometry analysis of human donor-derived erythroid CD235a+ cells after transplantation. Human CD235a+ erythroid cells were purified by immuno-magnetic bead selection and analyzed by flow cytometry for the indicated erythroid maturation markers (top panel). Enucleated reticulocytes were assessed by the cell-permeable DNA stain Hoechst 33342 and the erythroid marker CD235a (bottom panel).

[0076] FIG. 43 shows a plot of the oxygen binding affinity of blood from sickle cell disease model mice following transplantation of edited cells. Hemoglobin oxygenation was measured using a Hemox Analyzer (TCS Scientific) across a continuous declining gradient of oxygen pressure to assess whether HBB^{S}-to-HBB^{G} editing led to altered hemoglobin-oxygen binding. Blood was drawn from mice at week 14 after transplantation. Editing patterns are indicated on the plot with symbols (>, *, \hat{ })

### DEFINITIONS

[0077] As used herein and in the claims, the singular forms “a,” “an,” and “the” include the singular and the plural reference unless the context clearly indicates otherwise. Thus, for example, a reference to “an agent” includes a single agent and a plurality of such agents.

[0078] “Base editing” refers to genome editing technology that involves the conversion of a specific nucleic acid base into another at a targeted genomic locus. In certain embodiments, this can be achieved without requiring double-stranded DNA breaks (DSB), or single stranded breaks (i.e., nicking). To date, other genome editing techniques, including CRISPR-based systems, begin with the introduction of a DSB at a locus of interest. Subsequently, cellular DNA repair enzymes mend the break, commonly resulting in random insertions or deletions (indels) of bases at the site of the DSB. However, when the introduction or correction of a point mutation at a target locus is desired rather than stochastic disruption of the entire gene, these genome editing techniques are unsuitable, as correction rates are low (e.g. typically 0.1% to 5%), with the major genome editing products being indels. In order to increase the efficiency of gene correction without simultaneously introducing random indels, the present inventors previously modified the CRISPR/Cas9 system to directly convert one DNA base into another without DSB formation. See, Komor, A. C., et al., Programmable editing of a target base in genomic DNA without double-stranded DNA cleavage. Nature 533, 420-424 (2016), the entire contents of which is incorporated by reference herein.

[0079] The following base editor, which effects transitions (pyrimidine to pyrimidine, or purine to purine) mutations are relevant to the methods disclosed herein. Adenine base editor (or “ABE”). This type of editor converts an A:T Watson-Crick nucleobase pair to a G:C Watson-Crick nucleobase pair. Because the corresponding Watson-Crick paired bases are also interchanged as a result of the conversion, this category of base editor may also be referred to as a thymine base editor (or “TBE”).

[0080] The term “base editor (BE)” as used herein, refers to an agent comprising a polypeptide that is capable of making a modification to a base (e.g., A, T, C, G, or U) within a nucleic acid sequence (e.g., DNA or RNA). In some embodiments, the base editor is capable of deaminating a base within a nucleic acid such as a base within a DNA molecule. In the case of an adenine base editor, the base editor is capable of deaminating an adenine (A) in DNA. Such base editors may include a nucleic acid programmable DNA binding protein (napDNAbp) fused to an adenosine deaminase. Some base editors include CRISPR-mediated fusion proteins that are utilized in the base editing methods described herein. In some embodiments, the base editor comprises a nuclease-inactive Cas9 (dCas9) fused to a deaminase which binds a nucleic acid in a guide RNA-programmed manner via the formation of an R-loop, but does not cleave the nucleic acid. For example, the dCas9 domain of the base editor may include a D10A and a H840A mutation (which renders Cas9 capable of cleaving only one strand of a nucleic acid duplex), as described in PCT/US2016/058344, which published as WO 2017/070632 on Apr. 27, 2017 and is incorporated herein by reference in its entirety. The DNA cleavage domain of S. pyogenes Cas9 includes two subdomains, the HNH nuclease subdomain and the RuvC1 subdomain. The HNH subdomain cleaves the strand complementary to the gRNA (the “targeted strand”, or the strand in which editing or deamination occurs), whereas the RuvC1 subdomain cleaves the non-complementary strand containing the PAM sequence (the “non-edited strand”). The RuvC1 mutant D10A generates a nick in the targeted strand, while the HNH mutant H840A generates a nick on the non-edited strand (see Jinek et al., Science, 337:816-821(2012); Qi et al., Cell. 28; 152(5):1173-83 (2013)).

[0081] The term “base editor” encompasses the CRISPR-mediated fusion proteins utilized in the multiplexed base editing methods described herein as well as any base editor known or described in the art at the time of this filing or developed in the future. Reference is made to Rees & Liu, Base editing: precision chemistry on the genome and transcriptome of living cells, Nat. Rev. Genet. 2018; 19(12):770-788; as well as U.S. Patent Publication No. 2018/0073012, published Mar. 15, 2018, which issued as U.S. Pat. No. 10,113,163; on Oct. 30, 2018; U.S. Patent Publication No. 2017/0121693, published May 4, 2017, which issued as U.S. Pat. No. 10,167,457 on Jan. 1, 2019; International Publication No. WO 2017/070633, published Apr. 27, 2017; International Publication No. WO 2018/027078, published Aug. 2, 2018; International Application No PCT/US2018/056146, filed Oct. 16, 2018, which published as Publication No. WO 2019/079347 on Apr. 25, 2019; International Application No PCT/US2019/033848, filed May 23, 2019, which published as Publication No. WO 2019/226953 on Nov. 28, 2019; U.S. Patent Publication No. 2015/0166980, published Jun. 18, 2015; U.S. Pat. No. 9,840,699, issued Dec. 12, 2017; U.S. Pat. No. 10,077,453, issued Sep. 18, 2018; International Publication No. WO 2019/023680, published Jan. 31, 2019; International Publication No. WO 2018/0176009, published Sep. 27, 2018; International Publication No. WO 2020/041751, published Feb. 27, 2020; International Publication No. WO 2020/051360, published Mar. 12, 2020; International Patent Publication No. WO 2020/102659, published May 22, 2020; International Publication No. WO 2020/086908, published Apr. 30, 2020; International Publication No. WO 2020/181180, published Sep. 10, 2020; International Publication No. WO 2020/214842, published Oct. 22, 2020; International Publication No. WO 2020/092453, published May 7, 2020; International Patent Application No. PCT/US2020/033873, filed May 20, 2020, published as International Publication No. WO2020/236982 on Nov. 26, 2020, and International Application No. PCT/US2020/062428, filed Nov. 25, 2020, each of which is incorporated herein by reference in its entirety.

[0082] The term “Cas12” or “Cas12 nuclease” or “Cas12 domain” refers to a CRISPR-associated protein 12, or variant thereof, and embraces any naturally occurring Cas12 from any organism, any naturally-occurring Cas12 equivalent or fragment thereof, any Cas12 homolog, ortholog, or paralog from any organism, and any variant of a Cas12, naturally-occurring or engineered. Cas12a used to be referred to as Cpf1, thus this term embraces any naturally occurring Cpf1 from any organism, any naturally-occurring Cpf1 equivalent or fragment thereof, any Cpf1 homolog, ortholog, or paralog from any organism, and any variant of a Cpf1, naturally-occurring or engineered. The term Cas12 is not meant to be particularly limiting and may be referred to as a “Cas12 or variant thereof.” Exemplary Cas12 proteins are described herein and also described in the art.

[0083] The term “Cas9” or “Cas9 nuclease” or “Cas9 domain” refers to a CRISPR-associated protein 9, or variant thereof, and embraces any naturally occurring Cas9 from any organism, any naturally-occurring Cas9 equivalent or fragment thereof, any Cas9 homolog, ortholog, or paralog from any organism, and any variant of a Cas9, naturally-occurring or engineered. The term Cas9 is not meant to be particularly limiting and may be referred to as a “Cas9 or variant thereof.” Exemplary Cas9 proteins are described herein and also described in the art. The present disclosure is unlimited with regard to the particular Cas9 that is employed in the CRISPR-mediated fusion proteins utilized in the disclosure.

[0084] As used herein, the term “dCas9” refers to a nuclease-inactive Cas9 or nuclease-dead Cas9, or a variant thereof, and embraces any naturally occurring dCas9 from any organism, any naturally-occurring dCas9 equivalent or functional fragment thereof, any dCas9 homolog, ortholog, or paralog from any organism, and any variant of a dCas9, naturally-occurring or engineered. The term dCas9 is not meant to be particularly limiting and may be referred to as a “dCas9 or variant thereof.” Exemplary dCas9 proteins and methods for making dCas9 proteins are further described herein and/or are described in the art and are incorporated herein by reference. Any suitable mutation which inactivates both Cas9 endonucleases, such as D10A and H840A mutations in the wild-type S. pyogenes Cas9 amino acid sequence, or D10A and N580A mutations in the wild-type S. aureus Cas9 amino acid sequence, may be used to form the dCas9.

[0085] As used herein, the term “nCas9” or “Cas9 nickase” refers to a Cas9 or a variant thereof, which cleaves or nicks only one of the strands of a target cut site thereby introducing a nick in a double strand DNA molecule rather than creating a double strand break. This can be achieved by introducing appropriate mutations in a wild-type Cas9 which inactivates one of the two endonuclease activities of the Cas9. Any suitable mutation which inactivates one Cas9 endonuclease activity but leaves the other intact is contemplated, such as one of D10A or H840A mutations in the wild-type S. pyogenes Cas9 amino acid sequence, or a D10A mutation in the wild-type S. aureus Cas9 amino acid sequence, may be used to form the nCas9.

[0086] The term “deaminase” or “deaminase domain” refers to a protein or enzyme that catalyzes a deamination reaction. In some embodiments, the deaminase is an adenosine deaminase, which catalyzes the hydrolytic deamination of the nucleobase adenine. In some embodiments, the adenosine deaminase catalyzes the hydrolytic deamination of adenine in deoxyribonucleic acid (DNA) to hypoxanthine.

[0087] The deaminases provided herein may be from any organism, such as a bacterium. In some embodiments, the deaminase or deaminase domain is a variant of a naturally-occurring deaminase from an organism. In some embodiments, the deaminase or deaminase domain does not occur in nature. For example, in some embodiments, the deaminase or deaminase domain is at least 50%, at least 55%, at least 60%, at least 65%, at least 70%, at least 75% at least 80%, at least 85%, at least 90%, at least 95%, at least 96%, at least 97%, at least 98%, at least 99%, or at least 99.5% identical to a naturally-occurring deaminase.

[0088] As used herein, the term “adenosine deaminase domain” refers to a domain within a base editor comprising one or more adenosine deaminase enzymes. For instance, an adenosine deaminase domain may comprise a single adenosine deaminase. In other embodiments, an adenosine deaminase domain may comprise a heterodimer of a first adenosine deaminase and a second deaminase, e.g., wherein the two deaminases are connected by a linker. Adenosine deaminases (e.g., engineered adenosine deaminases or evolved adenosine deaminases) provided herein may be may comprise enzymes that convert adenosine (A) to inosine (I) in DNA. Such adenosine deaminases may cause an A:T to G:C base pair conversion. In some embodiments, the deaminase is a variant of a naturally-occurring deaminase from an organism. In some embodiments, the deaminase does not occur in nature. For example, in some embodiments, the deaminase is at least 50%, at least 55%, at least 60%, at least 65%, at least 70%, at least 75% at least 80%, at least 85%, at least 90%, at least 95%, at least 96%, at least 97%, at least 98%, at least 99%, or at least 99.5% identical to a naturally-occurring deaminase.

[0089] In some embodiments, the adenosine deaminase is derived from a bacterium, such as E. coli, S. aureus, S. typhi, S. putrefaciens, H. influenzae, or C. crescentus. In some embodiments, the adenosine deaminase is a TadA deaminase. In some embodiments, the TadA deaminase is an E. coli TadA deaminase (ecTadA). In some embodiments, the TadA deaminase is a truncated E. coli TadA deaminase. For example, the truncated ecTadA may be missing one or more N-terminal amino acids relative to a full-length ecTadA. In some embodiments, the truncated ecTadA may be missing 1, 2, 3, 4, 5, 6, 7, 8, 9, 10, 11, 12, 13, 14, 15, 6, 17, 18, 19, or 20 N-terminal amino acid residues relative to the full length ecTadA. In some embodiments, the truncated ecTadA may be missing 1, 2, 3, 4, 5, 6, 7, 8, 9, 10, 11, 12, 13, 14, 15, 6, 17, 18, 19, or 20 C-terminal amino acid residues relative to the full length ecTadA. In some embodiments, the ecTadA deaminase does not comprise an N-terminal methionine. Reference is made to U.S. Patent Publication No. 2018-0073012, published Mar. 15, 2018, and International Publication No. WO 2019/079347, each of which is incorporated herein by reference.

[0090] As used herein, the term “DNA binding protein” or “DNA binding protein domain” refers to any protein that localizes to and binds a specific target DNA nucleotide sequence (e.g., a gene locus of a genome). This term embraces RNA-programmable proteins, which associate (e.g., form a complex) with one or more nucleic acid molecules (i.e., which includes, for example, guide RNA in the case of Cas systems) that direct or otherwise program the protein to localize to a specific target nucleotide sequence (e.g., DNA sequence) that is complementary to the one or more nucleic acid molecules (or a portion or region thereof) associated with the protein. Exemplary RNA-programmable proteins are CRISPR-Cas9 proteins, as well as Cas9 equivalents, homologs, orthologs, or paralogs, whether naturally occurring or non-naturally occurring (e.g., engineered or modified), and may include a Cas9 equivalent from any type of CRISPR system (e.g., type II, V, VI), including Cpf1 (a type-V CRISPR-Cas systems), C2c1 (a type V CRISPR-Cas system), C2c2 (a type VI CRISPR-Cas system), C2c3 (a type V CRISPR-Cas system), dCas9, GeoCas9, CjCas9, Cas12a, Cas12b, Cas12c, Cas12d, Cas12g, Cas12h, Cas12i, Cas13d, Cas14, Argonaute, and nCas9. Further Cas-equivalents are described in Makarova et al., “C2c2 is a single-component programmable RNA-guided RNA-targeting CRISPR effector,” Science 2016; 353(6299), the contents of which are incorporated herein by reference.

[0091] The term “DNA editing efficiency,” as used herein, refers to the number or proportion of intended base pairs that are edited. For example, if a base editor edits 10% of the base pairs that it is intended to target (e.g., within a cell or within a population of cells), then the base editor can be described as being 10% efficient. Some aspects of editing efficiency embrace the modification (e.g. deamination) of a specific nucleotide within DNA, without generating a large number or percentage of insertions or deletions (i.e., indels). It is generally accepted that editing while generating less than 5% indels (as measured over total target nucleotide substrates) is high editing efficiency. The generation of more than 20% indels is generally accepted as poor or low editing efficiency. Indel formation may be measured by techniques known in the art, including high-throughput screening of sequencing reads.

[0092] The terms “RNA editing activity,” “RNA editing effects” and “RNA off-target editing,” as used herein, refer to the introduction of modifications (e.g., deaminations) to nucleotides within cellular RNA, e.g. messenger RNA (mRNA). An important goal of DNA base editing efficiency is the modification (e.g. deamination) of a specific nucleotide within DNA, without introducing modifications of similar nucleotides within RNA. RNA editing effects are “low” or “reduced” when a detected mutation is introduced into RNA molecules at a frequency of 0.3% or less. For reference, the ABEmax base editor introduces edits into RNA at a frequency of about 0.50%. RNA editing effects are “low” or “reduced” when a mutation is detected at a magnitude that is less than about 70,000 edits within an analyzed mRNA transcriptome. The number of RNA edits may be measured by techniques known in the art, including high-throughput screening of sequencing reads and RNA-seq. The effects of RNA editing on the function of a protein translated from the edited mRNA transcript may be predicted by use of the SIFT (“Sorting Intolerant from Tolerant”) algorithm, which bases predictions on sequence homology and the physical properties of amino acids.

[0093] The term “on-target editing,” as used herein, refers to the introduction of intended modifications (e.g., deaminations) to nucleotides (e.g., adenine) in a target sequence, such as using the base editors described herein. The term “off-target DNA editing,” as used herein, refers to the introduction of unintended modifications (e.g. deaminations) to nucleotides (e.g. adenine) in a sequence outside the canonical base editor binding window (i.e., from one protospacer position to another, typically 2 to 8 nucleotides long). Off-target DNA editing can result from weak or non-specific binding of the gRNA sequence to the target sequence. As used herein, the term “bystander editing” refers to synonymous off-target point mutations at nucleobases that are near (proximate to) the target base and do not change the outcome of the intended editing method.

[0094] As used herein, the term “purity” of a base editor refers to the editor's productive editing frequency, which is calculated as the mean rate at which the contacting of the target sequence with a base editor results in a product that does not contain an amino acid mutation.

[0095] The term “Cas9-dependent off-target editing” refers to the introduction of unintended modifications that result from weak or non-specific binding of a napDNAbp-gRNA complex (e.g., a complex between a gRNA and the base editor's napDNAbp domain) to nucleic acid sites that have fairly high (e.g. more than 60%, or having fewer than 6 mismatches relative to) sequence identity to a target sequence. In contrast, the term “Cas9-independent off-target editing” refers to the introduction of unintended modifications that result from weak associations of a base editor (e.g., the nucleotide modification domain) to nucleic acid sites that do not have high sequence identity (about 60% or less, or having 6-8 or more mismatches relative to) to a target sequence. Because these associations occur independent of any hybridization between the Cas9-gRNA complex and the relevant nucleic acid site, they are referred to as “Cas9-independent.”

[0096] The term “off-target editing frequency,” as used herein, refers to the number or proportion of unintended base pairs that are edited. On-target and off-target editing frequencies may be measured by the methods and assays described herein, further in view of techniques known in the art, including high-throughput sequencing reads. As used herein, high-throughput sequencing involves the hybridization of nucleic acid primers (e.g., DNA primers) with complementarity to nucleic acid (e.g., DNA) regions just upstream or downstream of the target sequence or off-target sequence of interest. Because the DNA target sequence and the Cas9-independent off-target sequences are known a priori in the methods disclosed herein, nucleic acid primers with sufficient complementarity to regions upstream or downstream of the target sequence and Cas9-independent off-target sequences of interest may be designed using techniques known in the art, such as the PhusionU PCR kit (Life Technologies), Phusion HS II kit (Life Technologies), and Illumina MiSeq kit. The identity and number of off-target DNA edits may be measured by techniques known in the art, including high-throughput screening of sequencing reads, EndoV-Seq, GUIDE-Seq, CIRCLE-Seq, and Cas-OFFinder. Since many of the Cas9-dependent off-target sites have high sequence identity to the target site of interest, nucleic acid primers with sufficient complementarity to regions upstream or downstream of the Cas9-dependent off-target site may likewise be designed using techniques and kits known in the art. These kits make use of polymerase chain reaction (PCR) amplification, which produces amplicons as intermediate products. The target and off-target sequences may comprise genomic loci that further comprise protospacers and PAMs. Accordingly, the term “amplicons,” as used herein, may refer to nucleic acid molecules that constitute the aggregates of genomic loci, protospacers and PAMs. High-throughput sequencing techniques used herein may further include Sanger sequencing and/or whole genome sequencing (WGS).

[0097] As used herein, a “ratio of on-target:off-target editing” means a ratio of sequencing reads reflecting on-target deaminations relative to deaminations of known or predicted off-target sites, or candidate off-target sites. Candidate off-target sites may be identified, and hence the ratio of on-target:off-target editing may be measured, using an experimental assay or a computation algorithm (e.g., Cas-OFFinder). For example, candidate off-target sites may be identified using an experimental assay such as EndoV-Seq, GUIDE-Seq, or CIRCLE-Seq. In some embodiments, the ratios of on-target editing:off-target editing relies on the use of EndoV-Seq.

[0098] The term “effective amount,” as used herein, refers to an amount of a biologically active agent that is sufficient to elicit a desired biological response. For example, in some embodiments, an effective amount of a composition may refer to the amount of the composition that is sufficient to edit a target site of a nucleotide sequence, e.g. a genome. In some embodiments, an effective amount of a composition provided herein, e.g., of a composition comprising a nuclease-inactive napDNAbp domain, a deaminase domain, a gRNA, may refer to the amount of the composition that is sufficient to induce editing of a target site specifically bound and edited by the base editor. In some embodiments, an effective amount of a composition provided herein may refer to the amount of the composition sufficient to induce editing having the following characteristics: >50% product purity, <5% indels, and an editing window of 2-8 nucleotides. As will be appreciated by the skilled artisan, the effective amount of an agent, e.g., a composition or a base editor-gRNA complex, may vary depending on various factors as, for example, on the desired biological response, e.g., on the specific allele, genome, or target site to be edited, on the cell or tissue being targeted, and/or on the base editor being used.

[0099] The term “evolved base editor” or “evolved base editor variant” refers to a base editor formed as a result of mutagenizing a reference or starting-point base editor. The term refers to embodiments in which the nucleotide modification domain is evolved or a separate domain is evolved. Mutagenizing a reference (or starting-point) base editor may comprise mutagenizing an adenosine deaminase. Amino acid sequence variations may include one or more mutated residues within the amino acid sequence of a reference base editor, e.g., as a result of a change in the nucleotide sequence encoding the base editor that results in a change in the codon at any particular position in the coding sequence, the deletion of one or more amino acids (e.g., a truncated protein), the insertion of one or more amino acids, or any combination of the foregoing. The evolved base editor may include variants in one or more components or domains of the base editor (e.g., mutations introduced into one or more adenosine deaminases).

[0100] The term “fusion protein” as used herein refers to a hybrid polypeptide which comprises protein domains from at least two proteins. One protein may be located at the amino-terminal (N-terminal) portion of the fusion protein or at the carboxy-terminal (C-terminal) protein thus forming an “amino-terminal fusion protein” or a “carboxy-terminal fusion protein,” respectively. A protein may comprise different domains, for example, a nucleic acid binding domain (e.g., the gRNA binding domain of Cas9 that directs the binding of the protein to a target site) and a nucleic acid cleavage domain or a catalytic domain of a nucleic-acid editing protein. Any of the proteins provided herein may be produced by any method known in the art. For example, the proteins provided herein may be produced via recombinant protein expression and purification, which is especially suited for fusion proteins comprising a peptide linker. Methods for recombinant protein expression and purification are well known and include those described by Green and Sambrook, Molecular Cloning: A Laboratory Manual (4^{th} ed., Cold Spring Harbor Laboratory Press, Cold Spring Harbor, N.Y. (2012)), the entire contents of which are incorporated herein by reference.

[0101] The term “host cell,” as used herein, refers to a cell that can host, replicate, and transfer a phage vector useful for a continuous evolution process as provided herein. In embodiments where the vector is a viral vector, a suitable host cell is a cell that may be infected by the viral vector, can replicate it, and can package it into viral particles that can infect fresh host cells. A cell can host a viral vector if it supports expression of genes of viral vector, replication of the viral genome, and/or the generation of viral particles. One criterion to determine whether a cell is a suitable host cell for a given viral vector is to determine whether the cell can support the viral life cycle of a wild-type viral genome that the viral vector is derived from. For example, if the viral vector is a modified M13 phage genome, as provided in some embodiments described herein, then a suitable host cell would be any cell that can support the wild-type M13 phage life cycle. Suitable host cells for viral vectors useful in continuous evolution processes are well known to those of skill in the art, and the disclosure is not limited in this respect. In some embodiments, the viral vector is a phage and the host cell is a bacterial cell. In some embodiments, the host cell is an E. coli cell. Suitable E. coli host strains will be apparent to those of skill in the art, and include, but are not limited to, New England Biolabs (NEB) Turbo, Top10F′, DH12S, ER2738, ER2267, and XL1-Blue MRF′. These strain names are art recognized and the genotype of these strains has been well characterized. It should be understood that the above strains are exemplary only and that the invention is not limited in this respect. The term “fresh,” as used herein interchangeably with the terms “non-infected” or “uninfected” in the context of host cells, refers to a host cell that has not been infected by a viral vector comprising a gene of interest as used in a continuous evolution process provided herein. A fresh host cell can, however, have been infected by a viral vector unrelated to the vector to be evolved or by a vector of the same or a similar type but not carrying the gene of interest.

[0102] In some embodiments, the host cell is a prokaryotic cell, for example, a bacterial cell. In some embodiments, the host cell is an E. coli cell. In some embodiments, the host cell is a eukaryotic cell, for example, a yeast cell, an insect cell, or a mammalian cell. The type of host cell, will, of course, depend on the viral vector employed, and suitable host cell/viral vector combinations will be readily apparent to those of skill in the art.

[0103] In some PACE embodiments, for example, in embodiments employing an M13 selection phage, the host cells are E. coli cells expressing the Fertility factor, also commonly referred to as the F factor, sex factor, or F-plasmid. The F-factor is a bacterial DNA sequence that allows a bacterium to produce a sex pilus necessary for conjugation and is essential for the infection of E. coli cells with certain phage, for example, with M13 phage. For example, in some embodiments, the host cells for M13-PACE are of the genotype F′proA⁺B⁺ Δ(lacIZY) zzf::Tn10(TetR)/endA1 recA1 galE15 galK16 nupG rpsL ΔlacIZYA araD139 Δ(ara,leu)7697 mcrA Δ(mrr-hsdRMS-mcrBC) proBA::pir116λ⁻.

[0104] The term “lagoon,” as used herein, refers to a vessel through which a flow of host cells is directed. When used for a continuous evolution process as provided herein, a lagoon typically holds a population of host cells and a population of viral vectors replicating within the host cell population, wherein the lagoon comprises an outflow through which host cells are removed from the lagoon and an inflow through which fresh host cells are introduced into the lagoon, thus replenishing the host cell population. In some embodiments, the flow of cells through the lagoon is regulated to result in an essentially constant number of host cells within the lagoon. In some embodiments, the flow of cells through the lagoon is regulated to result in an essentially constant number of fresh host cells within the lagoon.

[0105] The term “linker,” as used herein, refers to a chemical group or a molecule linking two molecules or domains, e.g., dCas9 and a deaminase. Typically, the linker is positioned between, or flanked by, two groups, molecules, or other domains and connected to each one via a covalent bond, thus connecting the two. In some embodiments, the linker is an amino acid or a plurality of amino acids (e.g. a peptide or protein). In some embodiments, the linker is an organic molecule, group, polymer, or chemical domain. Chemical groups include, but are not limited to, disulfide, hydrazone, and azide domains. In some embodiments, the linker is 5-100 amino acids in length, for example, 5, 6, 7, 8, 9, 10, 11, 12, 13, 14, 15, 16, 17, 18, 19, 20, 21, 22, 23, 24, 25, 26, 27, 28, 29, 30, 30-35, 35-40, 40-45, 45-50, 50-60, 60-70, 70-80, 80-90, 90-100, 100-150, or 150-200 amino acids in length. Longer or shorter linkers are also contemplated. In some embodiments, the linker is an XTEN linker. In some embodiments, the linker is a 32-amino acid linker. In other embodiments, the linker is a 30-, 31-, 33- or 34-amino acid linker.

[0106] As used herein, the term “low toxicity” refers to the maintenance of a viability above 60% in a population of cells following application of a base editing method or administration of a composition disclosed herein. The term may also refer to prevention of apoptosis (cell death) in a population of cells of more than 40%. For instance, a genome editing method that leads to less than 30% (e.g., 25%, 20%, 15%, 10%, or 5%) cell death exhibits low toxicity. Cell toxicity may be assessed by an appropriate staining assay, e.g., Annexin V and propidium iodide staining assays, and subsequent flow cytometry (e.g. FACS).

[0107] The term “mutation,” as used herein, refers to a substitution of a residue within a sequence, e.g. a nucleic acid or amino acid sequence, with another residue; a deletion or insertion of one or more residues within a sequence; or a substitution of a residue within a sequence of a genome in a subject to be corrected. Mutations are typically described herein by identifying the original residue followed by the position of the residue within the sequence and by the identity of the newly substituted residue. Various methods for making the amino acid substitutions (mutations) provided herein are well known in the art, and are provided by, for example, Green and Sambrook, Molecular Cloning: A Laboratory Manual (4^{th} ed., Cold Spring Harbor Laboratory Press, Cold Spring Harbor, N.Y. (2012)). Mutations can include a variety of categories, such as single base polymorphisms, microduplication regions, indel, and inversions, and is not meant to be limiting in any way. Mutations can include “loss-of-function” mutations which is a result of a mutation that reduces or abolishes a protein activity. Most loss-of-function mutations are recessive, because in a heterozygote the second chromosome copy carries an unmutated version of the gene coding for a fully functional protein whose presence compensates for the effect of the mutation. There are some exceptions where a loss-of-function mutation is dominant, one example being haploinsufficiency, where the organism is unable to tolerate the approximately 50% reduction in protein activity suffered by the heterozygote. This is the explanation for a few genetic diseases in humans, including Marfan syndrome, which results from a mutation in the gene for the connective tissue protein called fibrillin. Mutations also embrace “gain-of-function” mutations, which is one which confers an abnormal activity on a protein or cell that is otherwise not present in a normal condition. Many gain-of-function mutations are in regulatory sequences rather than in coding regions, and can therefore have a number of consequences. Alternatively, the mutation could lead to overexpression of one or more genes involved in control of the cell cycle, thus leading to uncontrolled cell division and hence to cancer. Because of their nature, gain-of-function mutations are usually dominant.

[0108] The term “mutagenesis plasmid,” as used herein, refers to a plasmid comprising a gene encoding a gene product that acts as a mutagen. In some embodiments, the gene encodes a DNA polymerase lacking a proofreading capability. In some embodiments, the gene is a gene involved in the bacterial SOS stress response, for example, a UmuC, UmuD, or RecA gene. In some embodiments, the gene is a GATC methylase gene, for example, a deoxyadenosine methylase (dam methylase) gene. In some embodiments, the gene is involved in binding of hemimethylated GATC sequences, for example, a seqA gene. In some embodiments, the gene is involved with repression of mutagenic nucleobase export, for example emrR. Mutagenesis plasmids (also referred to as mutagenesis constructs) are described, for example by International Patent Application, PCT/US2016/027795, filed Apr. 16, 2016, published as WO2016/168631, on Oct. 20, 2016, the entire contents of which are incorporated herein by reference.

[0109] The terms “non-naturally occurring” or “engineered” are used interchangeably and indicate the involvement of the hand of man. These terms, when referring to nucleic acid molecules or polypeptides (e.g., deaminases) mean that the nucleic acid molecule or the polypeptide is at least substantially free from at least one other component with which they are naturally associated in nature and/or as found in nature (e.g., an amino acid sequence not found in nature).

[0110] The term “nucleic acid,” as used herein, refers to RNA as well as single and/or double-stranded DNA. Nucleic acids may be naturally occurring, for example, in the context of a genome, a transcript, an mRNA, tRNA, rRNA, siRNA, snRNA, a plasmid, cosmid, chromosome, chromatid, or other naturally occurring nucleic acid molecule. On the other hand, a nucleic acid molecule may be a non-naturally occurring molecule, e.g. a recombinant DNA or RNA, an artificial chromosome, an engineered genome, or fragment thereof, or a synthetic DNA, RNA, DNA/RNA hybrid, or including non-naturally occurring nucleotides or nucleosides. Furthermore, the terms “nucleic acid,” “DNA,” “RNA,” and/or similar terms include nucleic acid analogs, e.g., analogs having other than a phosphodiester backbone. Nucleic acids may be purified from natural sources, produced using recombinant expression systems and optionally purified, chemically synthesized, etc. Where appropriate, e.g. in the case of chemically synthesized molecules, nucleic acids may comprise nucleoside analogs such as analogs having chemically modified bases or sugars, and backbone modifications. A nucleic acid sequence is presented in the 5′ to 3′ direction unless otherwise indicated. In some embodiments, a nucleic acid is or comprises natural nucleosides (e.g., adenosine, thymidine, guanosine, cytidine, uridine, deoxyadenosine, deoxythymidine, deoxyguanosine, and deoxycytidine); nucleoside analogs (e.g., 2-aminoadenosine, 2-thiothymidine, inosine, pyrrolo-pyrimidine, 3-methyl adenosine, 5-methylcytidine, 2-aminoadenosine, C5-bromouridine, C5-fluorouridine, C5-iodouridine, C5-propynyl-uridine, C5-propynyl-cytidine, C5-methylcytidine, 2-aminoadenosine, 7-deazaadenosine, 7-deazaguanosine, inosinedenosine, 8-oxoguanosine, 0(6)-methylguanine, and 2-thiocytidine); chemically modified bases; biologically modified bases (e.g., methylated bases, such as 2′-O-methylated bases); intercalated bases; modified sugars (e.g., 2′-fluororibose, ribose, 2′-deoxyribose, arabinose, and hexose); and/or modified phosphate groups (e.g., phosphorothioate and 5′-N-phosphoramidite linkages).

[0111] As used herein to modify guide RNA molecules, the term “backbone” refers to the component of the guide RNA that comprises the core region, also known as the crRNA/tracrRNA. The backbone is separate from the guide sequence, or spacer, region of the guide RNA, which has complementarity to a protospacer of a nucleic acid molecule.

[0112] The term “nucleic acid programmable DNA binding protein (napDNAbp)” refers to any protein that may associate (e.g., form a complex) with one or more nucleic acid molecules (i.e., which may broadly be referred to as a “napDNAbp-programming nucleic acid molecule” and includes, for example, guide RNA in the case of Cas systems) which direct or otherwise program the protein to localize to a specific target nucleotide sequence (e.g., a gene locus of a genome) that is complementary to the one or more nucleic acid molecules (or a portion or region thereof) associated with the protein, thereby causing the protein to bind to the nucleotide sequence at the specific target site. This term napDNAbp embraces CRISPR-Cas9 proteins, as well as Cas9 equivalents, homologs, orthologs, or paralogs, whether naturally occurring or non-naturally occurring (e.g., engineered or modified), and may include a Cas9 equivalent from any type of CRISPR system (e.g., type II, V, VI), including Cpf1 (a type-V CRISPR-Cas systems), C2c1 (a type V CRISPR-Cas system), C2c2 (a type VI CRISPR-Cas system), C2c3 (a type V CRISPR-Cas system), dCas9, GeoCas9, CjCas9, Cas12a (e.g., LbCas12a, AsCas12a, CeCas12a and MbCas12a), Cas12b, Cas12c, Cas12d, Cas12g, Cas12h, Cas12i, Cas13d, Cas14, Argonaute (Ago), nCas9, xCas9, SpCas9-NG, Cas9-KKH, SmacCas9, Spy-macCas9, an SpCas9-NRRH, an SpCas9-NRCH, and an SpCas9-NRTH, circularly permuted Cas9 domains such as CP1012, CP1028, CP1041, CP1249, and CP1300, and combinations of Cas9 domains such as an CP1041 and an SpCas-NG (SpCas9-NG-CP1041), and an SpCas9-VRQR and an SpCas9-NG (SpCas9-NG-VRQR). Additional napDNAbp Cas equivalents include Cas3 and CasΦ. Additional Cas-equivalents are described in Makarova et al., “C2c2 is a single-component programmable RNA-guided RNA-targeting CRISPR effector,” Science 2016; 353 (6299), the contents of which are incorporated herein by reference. However, the nucleic acid programmable DNA binding protein (napDNAbp) that may be used in connection with this invention are not limited to CRISPR-Cas systems. The invention embraces any such programmable protein, such as the Argonaute protein from Natronobacterium gregoryi (NgAgo) which may also be used for DNA-guided genome editing. NgAgo-guide DNA system does not require a PAM sequence or guide RNA molecules, which means genome editing can be performed simply by the expression of generic NgAgo protein and introduction of synthetic oligonucleotides on any genomic sequence. See Gao et al., DNA-guided genome editing using the Natronobacterium gregoryi Argonaute. Nature Biotechnology 2016; 34(7):768-73, which is incorporated herein by reference.

[0113] In some embodiments, the napDNAbp is a RNA-programmable nuclease, when in a complex with an RNA, may be referred to as a nuclease:RNA complex. Typically, the bound RNA(s) is referred to as a guide RNA (gRNA). gRNAs can exist as a complex of two or more RNAs, or as a single RNA molecule. gRNAs that exist as a single RNA molecule may be referred to as single-guide RNAs (sgRNAs), though “gRNA” is used interchangeably to refer to guide RNAs that exist as either single molecules or as a complex of two or more molecules. Typically, gRNAs that exist as single RNA species comprise two domains: (1) a domain that shares homology to a target nucleic acid (e.g., and directs binding of a Cas9 (or equivalent) complex to the target); and (2) a domain that binds a Cas9 protein. In some embodiments, domain (2) corresponds to a sequence known as a tracrRNA, and comprises a stem-loop structure. For example, in some embodiments, domain (2) is homologous to a tracrRNA as depicted in FIG. 1E of Jinek et al., Science 337:816-821(2012), the entire contents of which is incorporated herein by reference. Other examples of gRNAs (e.g., those including domain 2) can be found in U.S. Pat. No. 9,340,799, entitled “mRNA-Sensing Switchable gRNAs,” and International Patent Application No. PCT/US2014/054247, filed Sep. 6, 2013, published as WO 2015/035136, and entitled “Delivery System For Functional Nucleases,” the entire contents of each are herein incorporated by reference. In some embodiments, a gRNA comprises two or more of domains (1) and (2), and may be referred to as an “extended gRNA.” For example, an extended gRNA will, e.g., bind two or more Cas9 proteins and bind a target nucleic acid at two or more distinct regions, as described herein. The gRNA comprises a nucleotide sequence that complements a target site, which mediates binding of the nuclease/RNA complex to said target site, providing the sequence specificity of the nuclease:RNA complex. In some embodiments, the RNA-programmable nuclease is the (CRISPR-associated system) Cas9 endonuclease, for example Cas9 (Csn1) from Streptococcus pyogenes (see, e.g., “Complete genome sequence of an M1 strain of Streptococcus pyogenes.” Ferretti J. J. et al., Proc. Natl. Acad. Sci. U.S.A. 98:4658-4663(2001); “CRISPR RNA maturation by trans-encoded small RNA and host factor RNase III.” Deltcheva E. et al., Nature 471:602-607(2011); and “A programmable dual-RNA-guided DNA endonuclease in adaptive bacterial immunity.” Jinek M. et al., Science 337:816-821(2012), the entire contents of each of which are incorporated herein by reference.

[0114] The napDNAbp nucleases (e.g., Cas9) use RNA:DNA hybridization to target DNA cleavage sites, these proteins are able to be targeted, in principle, to any sequence specified by the guide RNA. Methods of using napDNAbp nucleases, such as Cas9, for site-specific cleavage (e.g., to modify a genome) are known in the art (see e.g., Cong, L. et al. Multiplex genome engineering using CRISPR/Cas systems. Science 339, 819-823 (2013); Mali, P. et al. RNA-guided human genome engineering via Cas9. Science 339, 823-826 (2013); Hwang, W. Y. et al. Efficient genome editing in zebrafish using a CRISPR-Cas system. Nature Biotechnology 31, 227-229 (2013); Jinek, M. et al. RNA-programmed genome editing in human cells. eLife 2, e00471 (2013); Dicarlo, J. E. et al., Genome engineering in Saccharomyces cerevisiae using CRISPR-Cas systems. Nucleic Acid Res. (2013); Jiang, W. et al. RNA-guided editing of bacterial genomes using CRISPR-Cas systems. Nature Biotechnology 31, 233-239 (2013); the entire contents of each of which are incorporated herein by reference).

[0115] The term “napDNAbp-programming nucleic acid molecule” or equivalently “guide sequence” refers the one or more nucleic acid molecules which associate with and direct or otherwise program a napDNAbp protein to localize to a specific target nucleotide sequence (e.g., a gene locus of a genome) that is complementary to the one or more nucleic acid molecules (or a portion or region thereof) associated with the protein, thereby causing the napDNAbp protein to bind to the nucleotide sequence at the specific target site. A non-limiting example is a guide RNA of a Cas protein of a CRISPR-Cas genome editing system.

[0116] A nuclear localization signal or sequence (NLS) is an amino acid sequence that tags, designates, or otherwise marks a protein for import into the cell nucleus by nuclear transport. Typically, this signal consists of one or more short sequences of positively charged lysines or arginines exposed on the protein surface. Different nuclear localized proteins may share the same NLS. An NLS has the opposite function of a nuclear export signal (NES), which targets proteins out of the nucleus. Thus, a single nuclear localization signal can direct the entity with which it is associated to the nucleus of a cell. Such sequences may be of any size and composition, for example more than 25, 25, 15, 12, 10, 8, 7, 6, 5, or 4 amino acids, but will preferably comprise at least a four to eight amino acid sequence known to function as a nuclear localization signal (NLS).

[0117] The term “phage-assisted continuous evolution (PACE),” as used herein, refers to continuous evolution that employs phage as viral vectors. The general concept of PACE technology has been described, for example, in International PCT Application, PCT/US2009/056194, filed Sep. 8, 2009, published as WO 2010/028347 on Mar. 11, 2010; International PCT Application, PCT/US2011/066747, filed Dec. 22, 2011, published as WO 2012/088381 on Jun. 28, 2012; U.S. Pat. No. 9,023,594, issued May 5, 2015; U.S. Pat. No. 9,771,574, issued Sep. 26, 2017; U.S. Pat. No. 9,394,537, issued Jul. 19, 2016; International PCT Application, PCT/US2015/012022, filed Jan. 20, 2015, published as WO 2015/134121 on Sep. 11, 2015; U.S. Pat. No. 10,179,911, issued Jan. 15, 2019; International PCT Application, PCT/US2016/027795, filed Apr. 15, 2016, published as WO 2016/168631 on Oct. 20, 2016; and International Patent Publication WO 2019/023680, published Jan. 31, 2019, each of which is incorporated herein by reference.

[0118] The term “phage-assisted non-continuous evolution (PANCE),” as used herein, refers to non-continuous evolution that employs phage as viral vectors. The general concept of PANCE technology has been described, for example, in Suzuki T. et al., Crystal structures reveal an elusive functional domain of pyrrolysyl-tRNA synthetase, Nat Chem Biol. 13(12): 1261-1266 (2017), incorporated herein by reference in its entirety. Briefly, PANCE is a simplified technique for rapid in vivo directed evolution using serial flask transfers of evolving ‘selection phage’ (SP), which contain a gene of interest to be evolved, across fresh E. coli host cells, thereby allowing genes inside the host E. coli to be held constant while genes contained in the SP continuously evolve. Following phage growth, an aliquot of infected cells is used to transfect a subsequent flask containing host E. coli. This process is continued until the desired phenotype is evolved, for as many transfers as required. Serial flask transfers have long served as a widely-accessible approach for laboratory evolution of microbes, and, more recently, analogous approaches have been developed for bacteriophage evolution. The PANCE system features lower stringency than the PACE system.

[0119] The term “promoter” is art-recognized and refers to a nucleic acid molecule with a sequence recognized by the cellular transcription machinery and able to initiate transcription of a downstream gene. A promoter may be constitutively active, meaning that the promoter is always active in a given cellular context, or conditionally active, meaning that the promoter is only active in the presence of a specific condition. For example, a conditional promoter may only be active in the presence of a specific protein that connects a protein associated with a regulatory element in the promoter to the basic transcriptional machinery, or only in the absence of an inhibitory molecule. A subclass of conditionally active promoters are inducible promoters that require the presence of a small molecule “inducer” for activity. Examples of inducible promoters include, but are not limited to, arabinose-inducible promoters, Tet-on promoters, and tamoxifen-inducible promoters. A variety of constitutive, conditional, and inducible promoters are well known to the skilled artisan, and the skilled artisan will be able to ascertain a variety of such promoters useful in carrying out the instant invention, which is not limited in this respect. In various embodiments, the disclosure provides vectors with appropriate promoters for driving expression of the nucleic acid sequences encoding the base editors (or one or more individual components thereof).

[0120] The term “selection phage,” as used herein interchangeably with the term “selection plasmid” and in the context of phage-assisted continuous evolution (PACE) systems, refers to a modified phage that comprises a nucleic acid sequence encoding an adenosine deaminase to be evolved, and lacks a full-length gene encoding a protein required for the generation of infectious phage particles. For example, some M13 selection phages provided herein comprise a nucleic acid sequence encoding a gene to be evolved, e.g., under the control of an M13 promoter, and lack all or part of a phage gene encoding a protein required for the generation of infectious phage particles, e.g., gI, gII, gIII, gIV, gV, gVI, gVII, gVIII, gIX, or gX, or any combination thereof. For example, some M13 selection phages provided herein comprise a nucleic acid sequence encoding an adenosine deaminase to be evolved, e.g., under the control of an M13 promoter, and lack all or part of a gene encoding a protein required for the generation of infective phage particles, e.g., the gIII gene encoding the pIII protein.

[0121] The term “subject,” as used herein, refers to an individual organism, for example, an individual mammal. In some embodiments, the subject is a human. In some embodiments, the subject is a non-human mammal. In some embodiments, the subject or organism is a non-human primate. In some embodiments, the subject or organism is a rodent. In some embodiments, the subject or organism is a sheep, a goat, cattle, a cat, or a dog. In some embodiments, the subject or organism is a vertebrate, an amphibian, a reptile, a fish, an insect, a fly, or a nematode. In some embodiments, the subject or organism is a research animal. In some embodiments, the subject or organism is a domesticated animal. In some embodiments, the subject or organism is a plant. In some embodiments, the subject or organism is genetically engineered, e.g. a genetically engineered non-human subject. The subject or organism may be of either sex and at any stage of development.

[0122] The term “target site” refers to a sequence within a nucleic acid molecule that is edited by a base editor. The target site further refers to the sequence within a nucleic acid molecule to which a complex of the base editor and gRNA binds.

[0123] The terms “treatment,” “treat,” and “treating,” refer to a clinical intervention aimed to reverse, alleviate, delay the onset of, or inhibit the progress of a disease, disorder, or condition, or one or more symptoms thereof, as described herein. As used herein, the terms “treatment,” “treat,” and “treating” refer to a clinical intervention aimed to reverse, alleviate, delay the onset of, or inhibit the progress of a disease, disorder, or condition, or one or more symptoms thereof, as described herein. In some embodiments, treatment may be administered after one or more symptoms have developed and/or after a disease has been diagnosed. In other embodiments, treatment may be administered in the absence of symptoms, e.g., to prevent or delay onset of a symptom or inhibit onset or progression of a disease. For example, treatment may be administered to a susceptible individual prior to the onset of symptoms (e.g., in light of a history of symptoms and/or in light of genetic or other susceptibility factors). Treatment may also be continued after symptoms have resolved, for example, to prevent or delay their prevention or recurrence.

[0124] The term “target site” refers to a sequence within a nucleic acid molecule that is deaminated by a deaminase or a base editor comprising a deaminase (e.g., an adenine base editor provided herein).

[0125] As used herein, e.g. for the purposes of reporting a specific number of loci, the terms “unique loci” and “unique genomic loci” refer to distinct genomic sequences (e.g. distinct coding sequences) wherein all copies of a distinct sequence in the genome are collectively counted (or reported) only once; in contrast, each copy of a “non-unique locus” or “repetitive element” is counted for purposes of reporting a specific number of loci.

[0126] As used herein, the term “variant” refers to a protein having characteristics that deviate from what occurs in nature that retains at least one functional i.e. binding, interaction, or enzymatic ability and/or therapeutic property thereof. A “variant” is at least about 70% identical, at least about 80% identical, at least about 90% identical, at least about 95% identical, at least about 96% identical, at least about 97% identical, at least about 98% identical, at least about 99% identical, at least about 99.5% identical, or at least about 99.9% identical to the wild type protein. For instance, a variant of Cas9 may comprise a Cas9 that has one or more changes in amino acid residues as compared to a wild type Cas9 amino acid sequence. As another example, a variant of a deaminase may comprise a deaminase that has one or more changes in amino acid residues as compared to a wild type deaminase amino acid sequence, e.g. following ancestral sequence reconstruction of the deaminase. These changes include chemical modifications, including substitutions of different amino acid residues truncations, covalent additions (e.g. of a tag), and any other mutations. This term also embraces fragments of a wild type protein.

[0127] The level or degree of which the property is retained may be reduced relative to the wild type protein but is typically the same or similar in kind. Generally, variants are overall very similar, and in many regions, identical to the amino acid sequence of the protein described herein. A skilled artisan will appreciate how to make and use variants that maintain all, or at least some, of a functional ability or property.

[0128] The variant proteins may comprise, or alternatively consist of, an amino acid sequence which is at least 80%, 85%, 90%, 95%, 96%, 97%, 98%, 99%, or 100%, identical to, for example, the amino acid sequence of a wild-type protein, or any protein provided herein (e.g., the adenosine deaminase domain of an adenine base editor). Further polypeptides encompassed by the invention are polypeptides encoded by polynucleotides which hybridize to the complement of a nucleic acid molecule encoding a protein such as a napDNAbp under stringent hybridization conditions (e.g. hybridization to filter bound DNA in 6×Sodium chloride/Sodium citrate (SSC) at about 45 degrees Celsius, followed by one or more washes in 0.2.times.SSC, 0.1% SDS at about 50-65 degrees Celsius), under highly stringent conditions (e.g. hybridization to filter bound DNA in 6×sodium chloride/Sodium citrate (SSC) at about 45 degrees Celsius, followed by one or more washes in 0.1×SSC, 0.2% SDS at about 68 degrees Celsius), or under other stringent hybridization conditions which are known to those of skill in the art (see, for example, Ausubel, F. M. et al., eds., 1989 Current Protocol in Molecular Biology, Green publishing associates, Inc., and John Wiley & Sons Inc., New York, at pp. 6.3.1-6.3.6 and 2.10.3).

[0129] By a polypeptide having an amino acid sequence at least, for example, 95% “identical” to a query amino acid sequence, it is intended that the amino acid sequence of the subject polypeptide is identical to the query sequence except that the subject polypeptide sequence may include up to five amino acid alterations per each 100 amino acids of the query amino acid sequence. In other words, to obtain a polypeptide having an amino acid sequence at least 95% identical to a query amino acid sequence, up to 5% of the amino acid residues in the subject sequence may be inserted, deleted, or substituted with another amino acid. These alterations of the reference sequence may occur at the amino- or carboxy-terminal positions of the reference amino acid sequence or anywhere between those terminal positions, interspersed either individually among residues in the reference sequence or in one or more contiguous groups within the reference sequence.

[0130] As a practical matter, whether any particular polypeptide is at least 80%, 85%, 90%, 95%, 96%, 97%, 98%, or 99% identical to, for instance, the amino acid sequence of a protein such as a napDNAbp, can be determined conventionally using known computer programs. A preferred method for determining the best overall match between a query sequence (a sequence of the present invention) and a subject sequence, also referred to as a global sequence alignment, can be determined using the FASTDB computer program based on the algorithm of Brutlag et al. (Comp. App. Biosci. 6:237-245 (1990)). In a sequence alignment the query and subject sequences are either both nucleotide sequences or both amino acid sequences. The result of said global sequence alignment is expressed as percent identity. Preferred parameters used in a FASTDB amino acid alignment are: Matrix=PAM 0, k-tuple=2, Mismatch Penalty=1, Joining Penalty=20, Randomization Group Length=0, Cutoff Score=1, Window Size=sequence length, Gap Penalty=5, Gap Size Penalty=0.05, Window Size=500 or the length of the subject amino acid sequence, whichever is shorter.

[0131] If the subject sequence is shorter than the query sequence due to N- or C-terminal deletions, not because of internal deletions, a manual correction must be made to the results. This is because the FASTDB program does not account for N- and C-terminal truncations of the subject sequence when calculating global percent identity. For subject sequences truncated at the N- and C-termini, relative to the query sequence, the percent identity is corrected by calculating the number of residues of the query sequence that are N- and C-terminal of the subject sequence, which are not matched/aligned with a corresponding subject residue, as a percent of the total bases of the query sequence. Whether a residue is matched/aligned is determined by results of the FASTDB sequence alignment. This percentage is then subtracted from the percent identity, calculated by the above FASTDB program using the specified parameters, to arrive at a final percent identity score. This final percent identity score is what is used for the purposes of the present invention. Only residues to the N- and C-termini of the subject sequence, which are not matched/aligned with the query sequence, are considered for the purposes of manually adjusting the percent identity score. That is, only query residue positions outside the farthest N- and C-terminal residues of the subject sequence.

[0132] As used herein, the term “wild type” is a term of the art understood by skilled persons and means the typical form of an organism, strain, gene, or characteristic as it occurs in nature as distinguished from mutant or variant forms.

[0133] These and other exemplary substituents are described in more detail in the Detailed Description, Examples, Figures, and Claims. The invention is not intended to be limited in any manner by the above exemplary listing of substituents.

### DETAILED DESCRIPTION OF THE INVENTION

[0134] The present disclosure provides adenine base editors that comprise an adenosine deaminase domain (e.g., a variant of an adenosine deaminase that deaminates deoxyadenosine in DNA as described herein) and a napDNAbp domain (e.g., a Cas9 protein) capable of binding to a specific nucleotide sequence, wherein the adenosine deaminase variants provide the base editor with lower off-target effects while maintaining editing efficiencies of existing ABEs. The deamination of an adenosine by an adenosine deaminase may lead to a point mutation from adenine (A) to guanine (G), a process referred to herein as nucleic acid editing. For example, the adenosine may be converted to an inosine residue. Within the constraints of a DNA polymerase active site, inosine pairs most stably with C and therefore is read or replicated by the cell's replication machinery as a guanine (G). Such base editors are useful inter alia for targeted editing of nucleic acid sequences. Such base editors may be used for targeted editing of DNA in vitro, e.g., for the generation of mutant cells or animals. Such base editors may be used for the introduction of targeted mutations in the cell of a living mammal. Such base editors may also be used for the introduction of targeted mutations for the correction of genetic defects in cells ex vivo, e.g., in cells obtained from a subject that are subsequently re-introduced into the same or another subject, or for multiplexed editing of a genome. And these base editors may be used for the introduction of targeted mutations in vivo, e.g., the correction of genetic defects or the introduction of deactivating mutations in disease-associated genes in a subject, or for multiplexed editing of a genome. The adenine base editors described herein may be utilized for the targeted editing of G to A mutations (e.g., targeted genome editing). The invention provides deaminases, base editors, nucleic acids, vectors, cells, compositions, methods, kits, and uses that utilize the deaminases and base editors provided herein.

[0135] In some embodiments, the present disclosure provides base editors having adenosine deaminase domains that are mutated (e.g. evolved to have mutations) that enable the deaminase domain to have improved activity when used with Cas homologs (e.g., homologs other than SpCas9). Accordingly, the present disclosure provides variants of adenosine deaminases (e.g., variants of TadA7.10) engineered from PACE and PANCE methodologies. These variants include ABE8e, which contains eight additional mutations relative to the TadA7.10 deaminase domain (where TadA7.10 contains the mutations W23R, H36L, P48A, R51L, L84F, A106V, D108N, H123Y, S146C, D147Y, R152P, E155V, I156F, and K157N in the ecTadA sequence). This motif increases deaminase activity (kₐₚₚ) 590-fold relative to that of ABE7.10. This evolved variant is broadly compatible with diverse Cas9 or Cas12 homologs, and exhibits improved editing efficiencies when paired with previously incompatible Cas9 or Cas12 homologs. For instance, disclosed adenosine deaminase variants such as TadA8e exhibit higher editing efficiencies when paired in a base editor with certain Cas9 variants, such as circularly permuted variants CP1041 and CP1028, than exhibited by the TadA7.10 deaminase.

[0136] ABE8e shows substantially increased editing efficiency relative to ABE7.10 in various base editing contexts. ABE8e also has increased processivity compared to ABE7.10, i.e., it enhances the frequency of alleles with multiple base conversions between 11- and 17-fold relative to ABE7.10. On-target:off-target DNA editing ratios with ABE8e are similar to those of ABE7.10. And, although ABE8e shows increased off-target RNA and DNA editing relative to ABE7.10, these off-target effects were reduced by introducing a V106W mutation into the TadA-8e domain.

[0137] The present disclosure provides additional variants of ABE7.10 that contain mutations in the TadA deaminase domain of the ABE. These evolved variants are also broadly compatible with diverse Cas9 and Cas12 homologs and exhibit improved editing efficiencies (up to 58-fold increases in average editing) when paired with previously incompatible Cas9 or Cas12 homologs. In certain embodiments, the base editors have increased processivity.

[0138] ABE8e and other variants exhibit modest increases in transcriptome-wide RNA off-target editing compared to ABE7.10, which is diminished by introducing mutations in the TadA-8e domain. ABE8e and other variants enable efficient base editing of hemoglobinopathy-protective natural point mutations in a GATA1 binding site in the BCL11A enhancer or in the HBG promoter in human cells, in contrast with canonical ABE7.10 (set forth in SEQ ID NO: 487).

[0139] Accordingly, the disclosure provides adenosine deaminase variants. In some embodiments, the adenosine deaminases provided herein comprise an amino acid sequence that comprises substitutions selected from T111X₁, D119X₂, and F149X₃, and further comprises at least one substitution selected from R26X₄, V88X₅, A109X₆, H122X₇, T166X₈, and D167X₉, relative to the amino acid sequence of SEQ ID NO: 315 (TadA7.10), or a corresponding substitution(s) in another adenosine deaminase, wherein X₁ is any amino acid other than T, X₂ is any amino acid other than D, X₃ is any amino acid other than F, X₄ is any amino acid other than R, X₅ is any amino acid other than V, X₆ is any amino acid other than A, X₇ is any amino acid other than H, X₈ is any amino acid other than T, and X₉ is any amino acid other than D. In some embodiments, the disclosure provides adenosine deaminase that further comprises a Y167X₁₀ relative to the amino acid sequence of SEQ ID NO: 315, or a corresponding substitution in another adenosine deaminase, wherein X₁₀ is any amino acid other than Y. In particular embodiments, X₁₀ is D. In some embodiments, the adenosine deaminases of the disclosure may further comprise at least one substitution selected from K20X₁₁, R21X₁₂, V82X₁₃, and V106X₁₃ relative to the amino acid sequence of SEQ ID NO: 315, or a corresponding substitution(s) in another adenosine deaminase, wherein X₁₁ is any amino acid other than K, X₁₂ is any amino acid other than R, X₁₃ is any amino acid other than V, and X₁₄ is any amino acid other than V.

[0140] In some embodiments, the described adenosine deaminases comprise T111R, D119N, and F149Y substitutions, and further comprises at least one substitution selected from R26C, V88A, A109S, H122N, T1661, and D167N, in the amino acid sequence corresponding to TadA7.10 (SEQ ID NO: 315), or corresponding substitutions in another adenosine deaminase. In some embodiments, the disclosed adenosine deaminase comprises the substitutions A109S, T111R, D119N, H122N, Y147D, F149Y, T1661 and D167N in its amino acid sequence. In certain embodiments, the adenosine deaminases comprise the substitutions V106W, A109S, T111R, D119N, H122N, Y147D, F149Y, T1661 and D167N. In an exemplary embodiment, the adenosine deaminase comprises TadA-8e (SEQ ID NO: 433). In another exemplary embodiment, the adenosine deaminase comprises TadA-8e (V106W) (SEQ ID NO: 434).

[0141] In some aspects, the disclosure provides base editors comprising one or more adenosine deaminase variants disclosed herein and a napDNAbp domain. In some embodiments, the napDNAbp domain comprises a Cas homolog. The napDNAbp domain may be selected from a Cas9, a Cas9n, a dCas9, a CasX, a CasY, a C2c1, a C2c2, a C2c3, a GeoCas9, a CjCas9, a Cas12a, a Cas12b, a Cas12g, a Cas12h, a Cas12i, a Cas13b, a Cas13c, a Cas13d, a Cas14, a Csn2, an xCas9, an SpCas9-NG, an SpCas9-NG-CP1041, an SpCas9-NG-VRQR, an LbCas12a, an AsCas12a, a Cas9-KKH, a circularly permuted Cas9, an Argonaute (Ago) domain, a SmacCas9, a Spy-macCas9, an SpCas9-VRQR, an SpCas9-NRRH, an SpaCas9-NRTH, an SpCas9-NRCH. In certain embodiments, the napDNAbp domain comprises or is a Cas9 domain or a Cas12a domain derived from S. pyogenes or S. aureus. In some embodiments, the napDNAbp domain comprises a nuclease dead Cas9 (dCas9) domain, a Cas9 nickase (nCas9) domain, or a nuclease active Cas9 domain.

[0142] Exemplary napDNAbp domains include, but are not limited to S. pyogenes Cas9 nickase (SpCas9n) and S. aureus Cas9 nickase (SaCas9n). Additional exemplary napDNAbp domains include S. aureus Cas9-KKH (SaCas9-KKH), LbCas12a, enAsCas12a (an engineered AsCas12a recently reported by Joung et al.⁹), SpCas9-NG, SpCas9-VRQR, SpCas9-NG-CP1041, SpCas9-NG-VRQR, SpCas9-NRCH, CP1028-SpCas9, and CP1041-SpCas9. In some embodiments, the napDNAbp domain comprises a Cas9 nickase (nCas9) domain. In some embodiments, the napDNAbp domain comprises an SpCas9n domain, e.g., a SpCas9n having the amino acid sequence set forth as SEQ ID NO: 365 or 370. In certain embodiments, the napDNAbp domain of any of the disclosed base editors is a SaCas9n, e.g., an SpCas9n having the amino acid sequence set forth as SEQ ID NO: 438. In certain embodiments, the napDNAbp domain of any of the disclosed base editors is an SpCas9-NRCH, e.g., an SpCas9-NRCH having the amino acid sequence set forth as SEQ ID NO: 436. In certain embodiments, the napDNAbp domain of any of the disclosed base editors is an LbCas12a, e.g., a catalytically inactive or “dead” LbCas12a. In certain embodiments, the napDNAbp domain of any of the disclosed base editors is an AsCas12a, e.g., an enAsCas12a. In certain embodiments, the napDNAbp domain of any of the disclosed base editors is a cicular permuted variant of SpCas9, e.g., a CP1028-SpCas9 or a CP1041-SpCas9. In certain embodiments, the napDNAbp domain of any of the disclosed base editors is an evolved SpCas9, e.g., an SpCas9-NG. In certain embodiments, the napDNAbp domain of any of the disclosed base editors is an SpCas9-NG-CP1041. In certain embodiments, the napDNAbp domain of any of the disclosed based editors is SpCas9-NG-VRQR.

[0143] In some embodiments, the napDNAbp comprises an amino acid sequence that is at least 90%, at least 95%, at least 98%, or at least 99% identical to any one of SEQ ID NOs: 435-442, 463 and 464.

[0144] In some embodiments, the napDNAbp is selected from SEQ ID NOs: 435-442, 463 and 464. In some embodiments, the napDNAbp is selected from SEQ ID NOs: 365, 370, 406 and 407.

[0145] Further provided herein are methods of contacting any of the disclosed adenine base editors with a nucleic acid molecule, e.g., a nucleic acid molecule (e.g., DNA) comprising a target sequence. In some embodiments of the disclosed methods, low off-target DNA and/or RNA editing effects are observed. In some embodiments, the nucleic acid molecule comprises a DNA, e.g., a single-stranded DNA or a double-stranded DNA. The target sequence of the nucleic acid molecule may comprise a target nucleobase pair containing an adenine (A). The target sequence may be comprised within a genome, e.g., a human genome. The target sequence may comprise a sequence, e.g., a target sequence with point mutation, associated with a disease or disorder. The target sequence with a point mutation may be associated with sickle cell disease. The target sequence with a point mutation may be associated with Glycogen storage disease type 1A or Stargardt macular dystrophy.

[0146] In some aspects, the present disclosure provides compositions comprising the adenine base editors with reduced RNA editing effects as described herein and one or more guide RNAs, e.g., a single-guide RNA (“sgRNA”). In addition, the present disclosure provides for nucleic acid molecules encoding and/or expressing the adenine base editors as described herein, as well as expression vectors or constructs for expressing the adenine base editors described herein and a gRNA, host cells comprising said nucleic acid molecules and expression vectors, and optionally one or more gRNAs, and compositions for delivering and/or administering nucleic acid-based embodiments described herein.

[0147] In some embodiments, the target nucleotide sequence is a DNA sequence in a genome, e.g., a eukaryotic genome. In certain embodiments, the target nucleotide sequence is in a mammalian (e.g., a human) genome. In certain embodiments, the target nucleotide sequence is in a human genome. In other embodiments, the target nucleotide sequence is in the genome of a rodent, such as a mouse or a rat. In other embodiments, the target nucleotide sequence is in the genome of a domesticated animal, such as a horse, cat, dog, or rabbit. In some embodiments, the target nucleotide sequence is in the genome of a research animal. In some embodiments, the target nucleotide sequence is in the genome of a genetically engineered non-human subject. In some embodiments, the target nucleotide sequence is in the genome of a plant. In some embodiments, the target nucleotide sequence is in the genome of a microorganism, such as a bacteria.

[0148] Without wishing to be bound by any particular theory, the adenine base editors described herein induce edits in nucleic acid substrates by use of TadA variants to deaminate A bases, causing A to G mutations via inosine formation. Inosine preferentially hydrogen bonds with C, resulting in an A to G mutation during DNA replication. When covalently tethered to a nucleic acid programmable DNA binding protein, the adenosine deaminase is localized to a target of interest and catalyzes A to G mutations in the DNA substrate.

[0149] In some embodiments, this editor may be used to target and revert single nucleotide polymorphisms (SNPs) in disease-relevant genes, which require A to G reversion. In some embodiments, any of the disclosed editors are used to target and revert an A to G mutation associated with sickle cell disease, Glycogen storage disease type 1A, or Stargardt macular dystrophy. The ABE editor can also be used to target and revert single nucleotide polymorphisms (SNPs) in disease-relevant genes, which require T to C reversion by mutating the A, opposite of the T, to a G. The T may then be replaced with a C, for example, by base excision repair mechanisms, or may be changed in subsequent rounds of DNA replication. For example, a reversion of −198T to C, or a reversion of −175T to C, in the promoter driving HBG1 and HBG2 gene expression by any of the disclosed base editors may result in increased expression of HBG1 and HBG2, and correction of the sickle cell disease phenotype. In other embodiments, the ABE editor is used to target and convert (but not revert) a mutant T to a mutant C (by mutating the A opposite of the T), wherein the SNP with a mutant C encodes a non-pathogenic variant. In some embodiments, this variant is found in nature. Such a strategy is used in connection with use of any of the disclosed base editors to convert a mutant T in an HBB allel—an SNP associated with sickle cell disease—to a variant known as the Makassar allele that does not result in a disease phenotype. Thus, the adenine base editors described herein may deaminate the A nucleobase to yield a nucleotide sequence that is not associated with a disease or disorder.

[0150] In some aspects, the disclosure provides complexes comprising the adenine base editors as described herein and one or more guide RNAs, e.g., a single-guide RNA (“sgRNA”), as well as compositions comprising any of these complexes. In addition, the present disclosure provides for nucleic acid molecules encoding and/or expressing the base editors as described herein, as well as expression vectors and constructs for expressing the base editors described herein and/or a gRNA (e.g., AAV vectors), host cells comprising any of said nucleic acid molecules and expression vectors and optionally vectors encoding one or more gRNAs, host cells comprising any of said base editors and optionally one or more gRNAs, and methods for delivering and/or administering nucleic acid-based embodiments described herein. In particular, the disclosure provides improved methods of delivery of the disclosed base editors, e.g., to a subject. Delivery of the disclosed ABE variants as RNPs, rather than DNA plasmids, typically increases on-target:off-target DNA editing ratios. Delivery of the disclosed ABE variants as mRNA molecules (e.g., using electroporation) may increase editing efficiencies.

[0151] Still further, the present disclosure provides for methods of creating the base editors described herein, as well as methods of using the base editors or nucleic acid molecules encoding any of these base editors in applications including editing a nucleic acid molecule, e.g., a genome. In certain embodiments, methods of engineering the base editors provided herein involve a phage-assisted continuous evolution (PACE) system or non-continuous system (e.g., PANCE), which may be utilized to evolve one or more components of a base editor (e.g., a deaminase domain). In certain embodiments, following the successful evolution of one or more components of the base editor (e.g., a deaminase domain), methods of making the base editors comprise recombinant protein expression methodologies and techniques known to those of skill in the art. Exemplary base editors are made by fusing or associating the adenosine deaminase domain to any of a variety of napDNAbp domains disclosed herein, such as a Cas9 domain.

[0152] The domains of the adenine base editors described herein (e.g., the napDNAbp domain or the adenosine deaminase domain) may be obtained as a result of mutagenizing a reference base editor (or a component or domain thereof) by a directed evolution process, e.g., a continuous evolution method (e.g., PACE) or a non-continuous evolution method (e.g., PANCE or other discrete plate-based selections). In various embodiments, the disclosure provides an adenine base editor that has one or more amino acid variations introduced into its amino acid sequence relative to the amino acid sequence of the reference base editor. The base editor may include variants in one or more components or domains of the base editor (e.g., variants introduced into a adenosine deaminase domain, or a variant introduced into both of these domains).

[0153] The nucleotide modification domain may be engineered in any way known to those of skill in the art. For example, the nucleotide modification domain may be evolved from a reference protein and evolved using PACE, PANCE, or other plate-based evolution methods to obtain a DNA modifying version of the nucleotide modification domain, which can then be used in the base editors described herein. For example, the disclosed adenosine deaminase variants may be at least about 70% identical, at least about 80% identical, at least about 90% identical, at least about 95% identical, at least about 96% identical, at least about 97% identical, at least about 98% identical, at least about 99% identical, at least about 99.5% identical, or at least about 99.9% identical to the reference enzyme. In some embodiments, the adenosine deaminase variant may have 1, 2, 3, 4, 5, 6, 7, 8, 9, 10, 11, 12, 13, 14, 15, 16, 17, 18, 19, 20, 21, 22, 21, 24, 25, 26, 27, 28, 29, 30, 31, 32, 33, 34, 35, 36, 37, 38, 39, 40, 41, 42, 43, 44, 45, 46, 47, 48, 49, 50, or more amino acid changes compared to a reference adenosine deaminase.

### Adenosine Deaminase Domains

[0154] The disclosure provides base editors that comprise an adenosine deaminase domain. In some aspects, any of the disclosed base editors are capable of deaminating adenosine in a nucleic acid sequence (e.g., DNA or RNA). As one example, any of the base editors provided herein may be base editors (e.g., adenine base editors). In some embodiments, the disclosed adenosine deaminases are variants of known adenosine deaminase TadA7.10, which comprises the following mutations as compared to wild-type ecTadA (SEQ ID NO: 325): W23R, H36L, P48A, R51L, L84F, A106V, D108N, H123Y, S146C, D147Y, R152P, E155V, I156F, and K157N. In some embodiments, the disclosed adenosine deaminases are variants of a TadA derived from a species other than E. coli, such as Staphylococcus aureus, Salmonella typhi, Shewanella putrefaciens, Haemophilus influenzae, Caulobacter crescentus, or Bacillus subtilis.

[0155] In various embodiments, the adenosine deaminases of the disclosed base editors hydrolytically deaminate a targeted adenosine in a nucleic acid of interest to an inosine, which is read as a guanosine (G) by DNA polymerase enzymes.

[0156] Exemplary, non-limiting, embodiments of adenosine deaminases are provided herein. In some embodiments, the adenosine deaminase domain of any of the disclosed base editors comprises a single adenosine deaminase, or a monomer. In some embodiments, the adenosine deaminase domain comprises 2, 3, 4 or 5 adenosine deaminases. In some embodiments, the adenosine deaminase domain comprises two adenosine deaminases, or a dimer. In some embodiments, the deaminase domain comprises a dimer of an engineered (or evolved) deaminase and a wild-type deaminase, such as a wild-type E. coli-derived deaminase. It should be appreciated that the mutations provided herein (e.g., mutations in ecTadA) may be applied to adenosine deaminases in other adenosine base editors, for example, those provided in International Publication No. WO 2018/027078, published Aug. 2, 2018; International Publication No. WO 2019/079347 on Apr. 25, 2019; International Application No PCT/US2019/033848, filed May 23, 2019, which published as International Publication No. WO 2019/226953 on Nov. 28, 2019; U.S. Patent Publication No. 2018/0073012, published Mar. 15, 2018, which issued as U.S. Pat. No. 10,113,163, on Oct. 30, 2018; U.S. Patent Publication No. 2017/0121693, published May 4, 2017, which issued as U.S. Pat. No. 10,167,457 on Jan. 1, 2019; International Publication No. WO 2017/070633, published Apr. 27, 2017; U.S. Patent Publication No. 2015/0166980, published Jun. 18, 2015; U.S. Pat. No. 9,840,699, issued Dec. 12, 2017; and U.S. Pat. No. 10,077,453, issued Sep. 18, 2018, and International Patent Application No. PCT/US2020/28568, filed Apr. 16, 2020; all of which are incorporated herein by reference in their entireties.

[0157] In some embodiments, any of the adenosine deaminases provided herein are capable of deaminating adenine, e.g., deaminating adenine in a deoxyadenosine residue of DNA. The adenosine deaminase may be derived from any suitable organism (e.g., E. coli). In some embodiments, the adenosine deaminase is a naturally-occurring adenosine deaminase that includes one or more mutations corresponding to any of the mutations provided herein (e.g., mutations in ecTadA). One of skill in the art will be able to identify the corresponding residue in any homologous protein and in the respective encoding nucleic acid by methods well known in the art, e.g., by sequence alignment and determination of homologous residues. An amino acid sequence alignment of exemplary TadA deaminases derived from Bacillus subtilis (set forth in full as SEQ ID NO: 318), S. aureus (SEQ ID NO: 317), and S. pyogenes (SEQ ID NO: 448) as compared to the consensus sequence of E. coli TadA is provided as FIG. 28. The amino acid substitutions in (E. coli) TadA-8e, and the homologous mutations in the B. subtilis, S. aureus, and S. pyogenes TadA deaminases, are shown. Accordingly, one of skill in the art would be able to generate mutations in any naturally-occurring adenosine deaminase (e.g., having homology to ecTadA) that corresponds to any of the mutations described herein, e.g., any of the mutations identified in ecTadA. In some embodiments, the adenosine deaminase is derived from a prokaryote. In some embodiments, the adenosine deaminase is from a bacterium. In some embodiments, the adenosine deaminase is from Escherichia coli, Staphylococcus aureus, Salmonella typhi, Shewanella putrefaciens, Haemophilus influenzae, Caulobacter crescentus, or Bacillus subtilis. In some embodiments, the adenosine deaminase is from E. coli.

[0158] In some embodiments, the adenosine deaminase domain comprises an adenosine deaminase that comprises an amino acid sequence that is at least 60%, at least 65%, at least 70%, at least 75%, at least 80%, at least 85%, at least 90%, at least 95%, at least 96%, at least 97%, at least 98%, at least 99%, or at least 99.5% identical to any one of the amino acid sequences set forth in any one of SEQ ID NOs: 324, 325, 433, 434, and 448 which are based on ecTadA, or to any of the adenosine deaminases provided herein. In certain embodiments, the adenosine deaminase comprises an amino acid sequence that is at least 80%, at least 85%, at least 90%, at least 95%, at least 96%, at least 97%, at least 98%, at least 99%, or at least 99.5% identical to the amino acid sequence of TadA7.10 (SEQ ID NO: 315). It should be appreciated that adenosine deaminases provided herein may include one or more mutations (e.g., any of the mutations provided herein). The disclosure provides adenosine deaminases with a certain percent identity plus any of the mutations or combinations thereof described herein. In some embodiments, the adenosine deaminase comprises an amino acid sequence that has 1, 2, 3, 4, 5, 6, 7, 8, 9, 10, 11, 12, 13, 14, 15, 16, 17, 18, 19, 20, 21, 22, 21, 24, 25, 26, 27, 28, 29, 30, 31, 32, 33, 34, 35, 36, 37, 38, 39, 40, 41, 42, 43, 44, 45, 46, 47, 48, 49, 50, or more mutations compared to any one of the amino acid sequences set forth in SEQ ID NOs: 315-325 (e.g., TadA7.10), 433, 434, and 448, or any of the adenosine deaminases provided herein. In some embodiments, the adenosine deaminase comprises an amino acid sequence that has at least 5, at least 10, at least 15, at least 20, at least 25, at least 30, at least 35, at least 40, at least 45, at least 50, at least 60, at least 70, at least 80, at least 90, at least 100, at least 110, at least 120, at least 130, at least 140, at least 150, at least 160, or at least 170 identical contiguous amino acid residues as compared to any one of the amino acid sequences set forth in SEQ ID NOs: 315-325 (e.g., TadA7.10), 433, 434, and 448, or any of the adenosine deaminases provided herein. In some embodiments, the adenosine deaminase comprises a variant of TadA 7.10, whose sequence is set forth as SEQ ID NO: 315.

[0159] In some aspects, the disclosure provides an adenosine deaminase comprising an amino acid sequence that comprises substitutions selected from T111X₁, D119X₂, and F149X₃, and further comprises at least one substitution selected from R26X₄, V88X₅, A109X₆, H122X₇, T166X₈, and D167X₉, relative to the amino acid sequence of SEQ ID NO: 315, or a corresponding substitution(s) in another adenosine deaminase, wherein X₁ is any amino acid other than T, X₂ is any amino acid other than D, X₃ is any amino acid other than F, X₄ is any amino acid other than R, X₅ is any amino acid other than V, X₆ is any amino acid other than A, X₇ is any amino acid other than H, X₈ is any amino acid other than T, and X₉ is any amino acid other than D.

[0160] In some embodiments, X₁ is a hydrophobic amino acid. In other embodiments, X₁ is a hydrophilic amino acid. In some embodiments, X₁ is a small amino acid. In other embodiments, X₁ is a large amino acid. In some embodiments, X₁ is R. In some embodiments, X₂ is a hydrophobic amino acid, a hydrophilic amino acid, a small amino acid, or a large amino acid. In some embodiments, X₂ is D. In some embodiments, X₃ is a hydrophobic amino acid. In other embodiments, X₃ is a large amino acid. In some embodiments, X₃ is Y.

[0161] In some embodiments, X₄ is a hydrophobic amino acid. In some embodiments, X₄ is a small amino acid. In some embodiments, X₄ is C. In some embodiments, X₅ is a hydrophobic amino acid. In some embodiments, X₅ is a small amino acid. In some embodiments, X₅ is A.

[0162] In some embodiments, one or more of X₆, X₇, X₈, or X₉ is a hydrophilic amino acid. In some embodiments, one or more of X₆, X₇, X₈, or X₉ is a small amino acid. In some embodiments, X₆ is S. In some embodiments, X₇ is N. In some embodiments, X₈ is I. In some embodiments, X₉ is N.

[0163] In some aspects, the disclosure provides adenosine deaminase that further comprises a Y167X₁₀ relative to the amino acid sequence of SEQ ID NO: 315, or a corresponding substitution in another adenosine deaminase, wherein X₁₀ is any amino acid other than Y. In some embodiments, X₁₀ is a hydrophobic amino acid. In other embodiments, X₁₀ is a hydrophilic amino acid. In some embodiments, X₁₀ is a small amino acid. In other embodiments, X₁₀ is a large amino acid. In particular embodiments, X₁₀ is D.

[0164] In another embodiment, the adenosine deaminases of the disclosure may further comprise at least one substitution selected from K20X₁₁, R21X₁₂, V82X₁₃, and V106X₁₃ relative to the amino acid sequence of SEQ ID NO: 315, or a corresponding substitution(s) in another adenosine deaminase, wherein X₁₁ is any amino acid other than K, X₁₂ is any amino acid other than R, X₁₃ is any amino acid other than V, and X₁₄ is any amino acid other than V. In some embodiments, one or more of X₁₁, X₁₂, X₁₃, or X₁₄ is a hydrophobic amino acid. In some embodiments, one or more of X₁₁, X₁₂, X₁₃, or X₁₄ is a small amino acid. In some embodiments, X₁₁ is A. In some embodiments, X₁₂ is A. In some embodiments, X₁₃ is G. In some embodiments, X₁₄ is a large amino acid. In some embodiments, X₁₄ is W.

[0165] In some embodiments, the adenosine deaminase comprises A109S, T111R, D119N, H122N, F149Y, T1661, and D167N substitutions in SEQ ID NO: 315, or a corresponding mutation in another adenosine deaminase. In some embodiments, the adenosine deaminase comprises R26C, D108W, T111R, D119N, and F149Y substitutions in SEQ ID NO: 315, or a corresponding mutation in another adenosine deaminase. In some embodiments, the adenosine deaminase comprises V88A, D108W, T111R, D119N, and F149Y substitutions in SEQ ID NO: 315, or a corresponding mutation in another adenosine deaminase. In some embodiments, the adenosine deaminase further comprises a Y147D substitution.

[0166] In some embodiments, the adenosine deaminase comprises A109S, T111R, D119N, H122N, Y147D, F149Y, T1661, and D167N substitutions in SEQ ID NO: 315, or a corresponding mutation in another adenosine deaminase. In some embodiments, the adenosine deaminase comprises TadA-8e (SEQ ID NO: 433). In some embodiments, the adenosine deaminase comprises A109S, T111R, D119N, H122N, Y147D, F149Y, T1661, and D167N in SEQ ID NO: 315, or a corresponding mutation in another adenosine deaminase. In some embodiments, the adenosine deaminase further comprises at least one substitution in the amino acid sequence of SEQ ID NO: 315 selected from K20A, R21A, V82G, and V106W. In certain embodiments, the adenosine deaminase comprises V106W, A109S, T111R, D119N, H122N, Y147D, F149Y, T1661 and D167N substitutions in SEQ ID NO: 315. In some embodiments, the adenosine deaminase comprises or is TadA-8e(V106W) (SEQ ID NO: 434). It should be appreciated, however, that additional deaminases may similarly be aligned to identify homologous amino acid residues that may be mutated as provided herein.

[0167] Analysis of several rounds of PACE on the adenosine deaminase TadA7.10 revealed enrichment of 11 additional consensus mutations across a variety of unique genotypes: R26G, V69A, V88A, A109S, T111R, D119N, H122N, Y147D, F149Y, T1661, and D167N (see FIGS. 2A-2B and FIG. 20). Accordingly, in some embodiments, the adenosine deaminase comprises several additional substitutions in TadA7.10 (SEQ ID NO: 315). In some embodiments, the adenosine deaminase comprises T111R, D119N, and F149Y substitutions in SEQ ID NO: 315, or a corresponding mutation in another adenosine deaminase. In particular embodiments, the adenosine deaminase comprises T111R, D119N, and F149Y substitutions, and further comprises at least one substitution selected from R26C, V88A, A109S, H122N, T1661, and D167N, in SEQ ID NO: 315, or a corresponding mutation in another adenosine deaminase.

[0168] Any of the adenosine deaminases described herein may be a truncated variant of any of the other adenosine deaminases described herein, e.g., any of the adenosine deaminases of SEQ ID NOs: 315-325, 433, 434, and 448. Exemplary truncated adenosine deaminases may comprise truncations of 1, 2, 3, 4, 5, 6, 7, 8, 9, 10, 11, 12, 13, 14, 15, or more than 15 amino acids from the N-terminus. Other exemplary truncated adenosine deaminases may comprise truncations of 1, 2, 3, 4, 5, 6, 7, 8, 9, 10, 11, 12, 13, 14, 15, or more than 15 amino acids from the C-terminus. In some embodiments, the adenosine deaminase domain comprises a trunacted version of the wild-type ecTadA, as set forth in SEQ ID NO: 324. Any of the adenosine deaminases described herein may include an N-terminal methionine (M) amino acid residue.

[0169] It should be appreciated that any of the mutations provided herein (e.g., based on the ecTadA amino acid sequence of SEQ ID NO: 315) may be introduced into other adenosine deaminases, such as S. aureus TadA (saTadA), or other adenosine deaminases (e.g., bacterial adenosine deaminases), such as those sequences provided below. It would be apparent to the skilled artisan how to identify amino acid residues from other adenosine deaminases that are homologous to the mutated residues in ecTadA. Thus, any of the mutations identified in ecTadA may be made in other adenosine deaminases that have homologous amino acid residues (see FIG. 28). Any of the mutations provided herein may be made individually or in any combination in ecTadA or another adenosine deaminase. Any of the mutated deaminases provided herein may be used in the context of adenine base editor.

[0170] In certain aspects, the disclosure provides adenine base editors with broadened target sequence compatibility. In general, native ecTadA deaminates the adenine in the sequence UAC (e.g., the target sequence) of the anticodon loop of tRNA^{Arg}. Without wishing to be bound by any particular theory, in order to expand the utility of ABEs comprising one or more ecTadA deaminases, such as any of the adenosine deaminases provided herein, the adenosine deaminase proteins were optimized to recognize a wide variety of target sequences within the protospacer sequence without compromising the editing efficiency of the adenosine nucleobase editor complex. In some embodiments, the target sequence is an A in the center of a 5′-NAN-3′ sequence, wherein N is T, C, G, or A. In some embodiments, the target sequence comprises 5′-TAC-3′. In some embodiments, the target sequence comprises 5′-GAA-3′.

[0171] In certain embodiments, the adenosine deaminase domain comprises an adenosine deaminase that has a sequence with at least 80%, at least 85%, at least 90%, at least 95%, at least 98%, at least 99%, or at least 99.5% sequence identity to SEQ ID NO: 433. In certain embodiments, the adenosine deaminase domain comprises an adenosine deaminase that has a sequence with at least 80%, at least 85%, at least 90%, at least 95%, at least 98%, at least 99%, or at least 99.5% sequence identity to SEQ ID NO: 433. In certain embodiments, the adenosine deaminase domain comprises an adenosine deaminase that has a sequence with at least 80%, at least 85%, at least 90%, at least 95%, at least 98%, at least 99%, or at least 99.5% sequence identity to SEQ ID NO: 434.

[0172] In some embodiments, any of the adenosine deaminase domains described herein may comprise an amino acid sequence having 1, 2, 3, 4, 5, 6, 7, 8, 9, 10, 11, 12, 13, 14, 15, 16, 17, 18, 19, 20, 25, 30, or more than 30 amino acids that differ relative to the amino acid sequence of either of SEQ ID NOs: 433 and 434. These differences may comprise amino acids that have been inserted, deleted, or substituted relative to the amino acid sequence of the wild type enzyme. In some embodiments, the disclosed adenosine deaminase domains contain stretches of about 50, about 75, about 100, about 125, about 150, about 175, about 200, about 300, about 400, about 500, or more than 500 consecutive amino acids in common with either of SEQ ID NOs: 433 and 434.

[0173] In some embodiments, any of the adenosine deaminase domains described herein may comprise an amino acid sequence having 1, 2, 3, 4, 5, 6, 7, 8, 9, 10, 11, 12, 13, 14, 15, 16, 17, 18, 19, 20, 25, 30, or more than 30 amino acids that differ relative to the amino acid sequence of a wild type adenosine deaminase (e.g., ecTadA). In some embodiments, any of the adenosine deaminase domains described herein may comprise an amino acid sequence having 1, 2, 3, 4, 5, 6, 7, 8, 9, 10, 11, 12, 13, 14, 15, 16, 17, 18, 19, 20, 25, 30, or more than 30 amino acids that differ relative to the amino acid sequence of any one of SEQ ID NOs: 315-325 and 448. These differences may comprise amino acids that have been inserted, deleted, or substituted relative to the amino acid sequence of the wild type enzyme. In some embodiments, the disclosed adenosine deaminase domains contain stretches of about 50, about 75, about 100, about 125, about 150, about 175, about 200, about 300, about 400, about 500, or more than 500 consecutive amino acids in common with a wild type adenosine deaminase. In some embodiments, the disclosed adenosine deaminase domains contain stretches of about 50, about 75, about 100, about 125, about 150, about 175, about 200, about 300, about 400, about 500, or more than 500 consecutive amino acids in common with any one of SEQ ID NOs: 315-325 and 448. In some embodiments, the adenosine deaminase domains comprise truncations at the N-terminus or C-terminus relative to a wild-type adenosine deaminase. In some embodiments, the adenosine deaminase domains comprise truncations at the N-terminus or C-terminus relative to any one of SEQ ID NOs: 315-325 and 448.

[0174] Exemplary adenine nucleobase editors include, but are not limited to, ABE7.10 (or ABEmax), ABE8e, SaKKH-ABE8e, NG-ABE8e, ABE-xCas9, SaKKH-ABE7.10, NG-ABE7.10, ABE7.10-VRQR, ABE8e-NRTH, ABE8e-NRRH, ABE8e-NRCH, NG-CP1041-ABE8e, ABE8e-CP1041, ABE8e-CP1028, and ABE8e-VRQR. In certain embodiments, the adenine nucleobase editor used in the disclosed methods is an ABE8e or an ABE7.10. ABE8e may be referred to herein as “ABE8” or “ABE8.0”. The ABE8e nucleobase editor and variants thereof may comprise an adenosine deaminase domain containing a TadA-8e adenosine deaminase monomer (monomer form) or a TadA-8e adenosine deaminase homodimer or heterodimer (dimer form). Other ABEs may be used to deaminate an A nucleobase in accordance with the disclosure.

[0175] Exemplary adenosine deaminase variants of the disclosure are described below. In certain embodiments, the adenosine deaminase domain comprises an adenosine deaminase that has a sequence with at least 80%, at least 85%, at least 90%, at least 95%, at least 98%, at least 99%, or at least 99.5% sequence identity to one of the following:

TadA7.10 (E. coli)
(SEQ ID NO: 315)
MSEVEFSHEYWMRHALTLAKRARDEREVPVGAVLVLNNRVIGEGWNRAIGLHDPTAHA
EIMALRQGGLVMQNYRLIDATLYVTFEPCVMCAGAMIHSRIGRVVFGVRNAKTGAAGS
LMDVLHYPGMNHRVEITEGILADECAALLCYFFRMPRQVFNAQKKAQSSTD
TadA7.10 (V106W)(E. coli)
(SEQ ID NO: 316)
MSEVEFSHEYWMRHALTLAKRARDEREVPVGAVLVLNNRVIGEGWNRAIGLHDPTAHA
EIMALRQGGLVMQNYRLIDATLYVTFEPCVMCAGAMIHSRIGRVVFGWRNAKTGAAGS
LMDVLHYPGMNHRVEITEGILADECAALLCYFFRMPRQVFNAQKKAQSSTD
TadA-8e (E. coli)
(SEQ ID NO: 433)
SEVEFSHEYWMRHALTLAKRARDEREVPVGAVLVLNNRVIGEGWNRAIGLHDPTAHAEI
MALRQGGLVMQNYRLIDATLYVTFEPCVMCAGAMIHSRIGRVVFGVRNSKRGAAGSLM
NVLNYPGMNHRVEITEGILADECAALLCDFYRMPRQVFNAQKKAQSSIN
TadA-8e(V106W)(E. coli)
(SEQ ID NO: 434)
SEVEFSHEYWMRHALTLAKRARDEREVPVGAVLVLNNRVIGEGWNRAIGLHDPTAHAEI
MALRQGGLVMQNYRLIDATLYVTFEPCVMCAGAMIHSRIGRVVFGWRNSKRGAAGSL
MNVLNYPGMNHRVEITEGILADECAALLCDFYRMPRQVFNAQKKAQSSIN
Staphylococcus aureus TadA:
(SEQ ID NO: 317)
MGSHMTNDIYFMTLAIEEAKKAAQLGEVPIGAIITKDDEVIARAHNLRETLQQPTAHAEH
IAIERAAKVLGSWRLEGCTLYVTLEPCVMCAGTIVMSRIPRVVYGADDPKGGCSGSLMN
LLQQSNFNHRAIVDKGVLKEACSTLLTTFFKNLRANKKSTN
Bacillus subtilis TadA:
(SEQ ID NO: 318)
MTQDELYMKEAIKEAKKAEEKGEVPIGAVLVINGEIIARAHNLRETEQRSIAHAEMLVID
EACKALGTWRLEGATLYVTLEPCPMCAGAVVLSRVEKVVFGAFDPKGGCSGTLMNLLQ
EERFNHQAEVVSGVLEEECGGMLSAFFRELRKKKKAARKNLSE
Salmonella typhimurium (S. typhimurium) TadA:
(SEQ ID NO: 319)
MPPAFITGVTSLSDVELDHEYWMRHALTLAKRAWDEREVPVGAVLVHNHRVIGEGWNR
PIGRHDPTAHAEIMALRQGGLVLQNYRLLDTTLYVTLEPCVMCAGAMVHSRIGRVVFGA
RDAKTGAAGSLIDVLHHPGMNHRVEIIEGVLRDECATLLSDFFRMRRQEIKALKKADRA
EGAGPAV
Shewanella putrefaciens (S. putrefaciens) TadA:
(SEQ ID NO: 320)
MDEYWMQVAMQMAEKAEAAGEVPVGAVLVKDGQQIATGYNLSISQHDPTAHAEILCL
RSAGKKLENYRLLDATLYITLEPCAMCAGAMVHSRIARVVYGARDEKTGAAGTVVNLL
QHPAFNHQVEVTSGVLAEACSAQLSRFFKRRRDEKKALKLAQRAQQGIE
Haemophilus influenzae F3031 (H. influenzae) TadA:
(SEQ ID NO: 321)
MDAAKVRSEFDEKMMRYALELADKAEALGEIPVGAVLVDDARNIIGEGWNLSIVQSDPT
AHAEIIALRNGAKNIQNYRLLNSTLYVTLEPCTMCAGAILHSRIKRLVFGASDYKTGAIGS
RFHFFDDYKMNHTLEITSGVLAEECSQKLSTFFQKRREEKKIEKALLKSLSDK
Caulobacter crescentus (C. crescentus) TadA:
(SEQ ID NO: 322)
MRTDESEDQDHRMMRLALDAARAAAEAGETPVGAVILDPSTGEVIATAGNGPIAAHDPT
AHAEIAAMRAAAAKLGNYRLTDLTLVVTLEPCAMCAGAISHARIGRVVFGADDPKGGA
VVHGPKFFAQPTCHWRPEVTGGVLADESADLLRGFFRARRKAKI
Geobacter sulfurreducens (G. sulfurreducens) TadA:
(SEQ ID NO: 323)
MSSLKKTPIRDDAYWMGKAIREAAKAAARDEVPIGAVIVRDGAVIGRGHNLREGSNDPS
AHAEMIAIRQAARRSANWRLTGATLYVTLEPCLMCMGAIILARLERVVFGCYDPKGAAG
SLYDLSADPRLNHQVRLSPGVCQEECGTMLSDFFRDLRRRKKAKATPALFIDERKVPPEP
Streptococcus pyogenes (S. pyogenes) TadA
(SEQ ID NO: 448)
MPYSLEEQTYFMQEALKEAEKSLQKAEIPIGCVIVKDGEIIGRGHNAREESNQAIMHAEI
MAINEANAHEGNWRLLDTTLFVTIEPCVMCSGAIGLARIPHVIYGASNQKFGGADSLYQI
LTDERLNHRVQVERGLLAADCANIMQTFFRQGRERKKIAKHLIKEQSDPFD

[0176] In some embodiments, the adenosine deaminase domain comprises an N-terminal truncated E. coli TadA. In certain embodiments, the adenosine deaminase comprises the amino acid sequence:

(SEQ ID NO: 324)
MSEVEFSHEYWMRHALTLAKRAWDEREVPVGAVLVHNNRVIGEGWNRPIG
RHDPTAHAEIMALRQGGLVMQNYRLIDATLYVTLEPCVMCAGAMIHSRIG
RVVFGARDAKTGAAGSLMDVLHHPGMNHRVEITEGILADECAALLSDFFR
MRRQEIKAQKKAQSSTD.

[0177] In some embodiments, the TadA deaminase is a full-length E. coli TadA deaminase (ecTadA). For example, in certain embodiments, the adenosine deaminase domain comprises a deaminase that comprises the amino acid sequence:

(SEQ ID NO: 325)
MRRAFITGVFFLSEVEFSHEYWMRHALTLAKRAWDEREVPVGAVLVHNNR
VIGEGWNRPIGRHDPTAHAEIMALRQGGLVMQNYRLIDATLYVTLEPCVM
CAGAMIHSRIGRVVFGARDAKTGAAGSLMDVLHHPGMNHRVEITEGILAD
ECAALLSDFFRMRRQEIKAQKKAQSSTD

[0178] Any two or more of the adenosine deaminases described herein may be connected to one another (e.g., by a linker, such as a peptide linker) within an adenosine deaminase domain of the base editors provided herein. In some embodiments, the base editor comprises two adenosine deaminases (e.g., a first adenosine deaminase and a second adenosine deaminase). For instance, in certain embodiments, the base editors provided herein may contain exactly two adenosine deaminases. In some embodiments, the first and second adenosine deaminases are any of the adenosine deaminases provided herein. In some embodiments, the adenosine deaminases are the same. In some embodiments, the adenosine deaminases are different. In some embodiments, the first adenosine deaminase and second adenosine deaminase are derived from the same bacterial species. In some embodiments, the first adenosine deaminase and second adenosine deaminase are derived from different bacterial species.

[0179] In some embodiments, the base editor comprises a heterodimer of a first adenosine deaminase and a second adenosine deaminase. In some embodiments, the first adenosine deaminase is N-terminal to the second adenosine deaminase in the base editor. In some embodiments, the first adenosine deaminase is C-terminal to the second adenosine deaminase in the base editor. In some embodiments, the first adenosine deaminase and the second deaminase are fused directly to each other or via a linker. In some embodiments, the first adenosine deaminase is fused N-terminal to the napDNAbp via a linker, and the second deaminase is fused C-terminal to the napDNAbp via a linker. In other embodiments, the second adenosine deaminase is fused N-terminal to the napDNAbp via a linker, and the first deaminase is fused C-terminal to the napDNAbp via a linker.

[0180] In some embodiments, the base editors disclosed herein comprise a heterodimer of a first adenosine deaminase and a second adenosine deaminase, wherein the first adenosine deaminase comprises a wild-type TadA sequence (e.g., the wild-type ecTadA sequence of SEQ ID NO: 325 or the truncated wild-type ecTadA sequence of SEQ ID NO: 324; and the second adenosine deaminase comprises any of the adenosine deaminase variants disclosed herein. In some embodiments, the base editors disclosed herein comprise a heterodimer of a first adenosine deaminase that comprises a sequence with at least 80%, 85%, 90%, 95%, 98%, 99%, or 99.5% sequence identity to SEQ ID NO: 324; and the second adenosine deaminase comprises a sequence with at least 80%, 85%, 90%, 95%, 98%, 99%, or 99.5% sequence identity to SEQ ID NO: 433 or 434.

[0181] In particular embodiments, the base editors disclosed herein comprise a heterodimer of a first adenosine deaminase that comprises a sequence with at least 90%, 95%, 98%, 99%, or 99.5% sequence identity to SEQ ID NO: 324; and the second adenosine deaminase comprises a sequence with at least 90%, 95%, 98%, 99%, or 99.5% sequence identity to SEQ ID NO: 433. In some embodiments, the base editors disclosed herein comprise a heterodimer of a first adenosine deaminase that comprises a sequence with at least 90%, 95%, 98%, 99%, or 99.5% sequence identity to SEQ ID NO: 324; and the second adenosine deaminase comprises a sequence with at least 90%, 95%, 98%, 99%, or 99.5% sequence identity to SEQ ID NO: 434.

[0182] The amino acid sequences of the adenosine deaminases provided herein include an initial methionine (M) residue, and every provided amino acid substitutions in these deaminases are described relative to that initial methionine residue. It should be appreciated that, in some embodiments, the adenosine deaminases provided herein may not contain an initial M residue, and accordingly the positions of the provided substitutions may shift by one.

napDNAbp Domains

[0183] The base editors described herein comprise a nucleic acid programmable DNA binding (napDNAbp) domain. The napDNAbp is associated with at least one guide nucleic acid (e.g., guide RNA), which localizes the napDNAbp to a DNA sequence that comprises a DNA strand (i.e., a target strand) that is complementary to the guide nucleic acid, or a portion thereof (e.g., the protospacer of a guide RNA). In other words, the guide nucleic-acid “programs” the napDNAbp domain to localize and bind to a complementary sequence of the target strand. Binding of the napDNAbp domain to a complementary sequence enables the nucleobase modification domain (i.e., the adenosine deaminase domain) of the base editor to access and enzymatically deaminate a target adenine base in the target strand.

[0184] The napDNAbp can be a CRISPR (clustered regularly interspaced short palindromic repeat)-associated nuclease. As outlined above, CRISPR is an adaptive immune system that provides protection against mobile genetic elements (viruses, transposable elements and conjugative plasmids). CRISPR clusters contain spacers, sequences complementary to antecedent mobile elements, and target invading nucleic acids. CRISPR clusters are transcribed and processed into CRISPR RNA (crRNA). In type II CRISPR systems correct processing of pre-crRNA requires a trans-encoded small RNA (tracrRNA), endogenous ribonuclease 3 (rnc) and a Cas9 protein. The tracrRNA serves as a guide for ribonuclease 3-aided processing of pre-crRNA. Subsequently, Cas9/crRNA/tracrRNA endonucleolytically cleaves linear or circular dsDNA target complementary to the spacer. The target strand not complementary to crRNA is first cut endonucleolytically, then trimmed 3′-5′ exonucleolytically. In nature, DNA-binding and cleavage typically requires protein and both RNAs. However, single guide RNAs (“sgRNA”, or simply “gNRA”) can be engineered so as to incorporate aspects of both the crRNA and tracrRNA into a single RNA species. See, e.g., Jinek et al., Science 337:816-821(2012), the entire contents of which is hereby incorporated by reference.

[0185] Without wishing to be bound by any particular theory, the binding mechanism of a napDNAbp—guide RNA complex, in general, includes the step of forming an R-loop whereby the napDNAbp induces the unwinding of a double-strand DNA target, thereby separating the strands in the region bound by the napDNAbp. The guideRNA protospacer then hybridizes to the “target strand.” This displaces a “non-target strand” that is complementary to the target strand, which forms the single strand region of the R-loop. In some embodiments, the napDNAbp includes one or more nuclease activities, which cuts the DNA leaving various types of lesions (e.g., a nick in one strand of the DNA). For example, the napDNAbp may comprises a nuclease activity that cuts the non-target strand at a first location, and/or cuts the target strand at a second location. Depending on the nuclease activity, the target DNA can be cut to form a “double-stranded break” whereby both strands are cut. In other embodiments, the target DNA can be cut at only a single site, i.e., the DNA is “nicked” on one strand.

[0186] The below description of various napDNAbps which can be used in connection with the disclosed adenosine deaminases is not meant to be limiting in any way. The adenine base editors may comprise the canonical SpCas9, or any ortholog Cas9 protein, or any variant Cas9 protein—including any naturally occurring variant, mutant, or otherwise engineered version of Cas9—that is known or which can be made or evolved through a directed evolutionary or otherwise mutagenic process. In various embodiments, the napDNAbp has a nickase activity, i.e., only cleave one strand of the target DNA sequence. In other embodiments, the napDNAbp has an inactive nuclease, e.g., are “dead” proteins. Other variant Cas9 proteins that may be used are those having a smaller molecular weight than the canonical SpCas9 (e.g., for easier delivery) or having modified or rearranged primary amino acid sequence (e.g., the circular permutant forms). The adenine base editors described herein may also comprise Cas9 equivalents, including Cas12a/Cpf1 and Cas12b proteins. The napDNAbps used herein (e.g., SpCas9, SaCas9, or SaCas9 variant or SpCas9 variant) may also may also contain various modifications that alter/enhance their PAM specifities. The disclosure contemplates any Cas9, Cas9 variant, or Cas9 equivalent which has at least 70%, at least 75%, at least 80%, at least 85%, at least 90%, at least 91%, at least 92%, at least 93%, at least 94%, at least 95%, at least 96%, at least 97%, at least 98%, at least 99%, or at least 99.9% sequence identity to a reference Cas9 sequence, such as a reference SpCas9 canonical sequence (set forth in SEQ ID NO: 326), a reference SaCas9 canonical sequence (set forth in SEQ ID NO: 377) or a reference Cas9 equivalent (e.g., Cas12a/Cpf1).

[0187] In some embodiments, the napDNAbp directs cleavage of one or both strands at the location of a target sequence, such as within the target sequence and/or within the complement of the target sequence. In some embodiments, the napDNAbp directs cleavage of one or both strands within about 1, 2, 3, 4, 5, 6, 7, 8, 9, 10, 15, 20, 25, 50, 100, 200, 500, or more base pairs from the first or last nucleotide of a target sequence. For example, an aspartate-to-alanine substitution (D10A) in the RuvC I catalytic domain of Cas9 from S. pyogenes converts Cas9 from a nuclease that cleaves both strands to a nickase (cleaves a single strand). Other examples of mutations that render Cas9 a nickase include, without limitation, H840A, N854A, and N863A in reference to the canonical SpCas9 sequence, or to equivalent amino acid positions in other Cas9 variants or Cas9 equivalents.

[0188] In some embodiments, the napDNAbp domain may comprise more than one napDNAbp proteins. Accordingly, in some embodiments, any of the disclosed base editors may contain a first napDNAbp domain and a second napDNAbp domain. In some embodiments, the napDNAbp domain (or the first and second napDNAbp domain, respectively) comprises a first Cas homolog or variant and a second Cas homolog or variant (e.g., a first Cas variant comprising a Cas9-NG and a second Cas variant comprising a Cas9-CP1041, e.g., “SpCas9-NG-CP1041”). In some embodiments, the first Cas variant comprises a Cas9-NG, and the second Cas variant comprises a SpCas9-VRQR.

[0189] As used herein, the term “Cas protein” refers to a full-length Cas protein obtained from nature, a recombinant Cas protein having a sequences that differs from a naturally occurring Cas protein, or any fragment of a Cas protein that nevertheless retains all or a significant amount of the requisite basic functions needed for the disclosed methods, i.e., (i) possession of nucleic-acid programmable binding of the Cas protein to a target DNA, and (ii) ability to nick the target DNA sequence on one strand. The Cas proteins contemplated herein embrace CRISPR Cas9 proteins, as well as Cas9 equivalents, variants (e.g., Cas9 nickase (nCas9) or nuclease inactive Cas9 (dCas9)) homologs, orthologs, or paralogs, whether naturally occurring or non-naturally occurring (e.g., engineered or recombinant), and may include a Cas9 equivalent from any type of CRISPR system (e.g., type II, V, VI), including Cpf1 (a type-V CRISPR-Cas systems), C2c1 (a type V CRISPR-Cas system), C2c2 (a type VI CRISPR-Cas system) and C2c3 (a type V CRISPR-Cas system). Further Cas-equivalents are described in Makarova et al., “C2c2 is a single-component programmable RNA-guided RNA-targeting CRISPR effector,” Science 2016; 353(6299), the contents of which are incorporated herein by reference.

[0190] The term “Cas9” or “Cas9 domain” embraces any naturally occurring Cas9 from any organism, any naturally-occurring Cas9 equivalent or functional fragment thereof, any Cas9 homolog, ortholog, or paralog from any organism, and any mutant or variant of a Cas9, naturally-occurring or engineered. The term Cas9 is not meant to be particularly limiting and may be referred to as a “Cas9 or equivalent.” Exemplary Cas9 proteins are further described herein and/or are described in the art and are incorporated herein by reference. The present disclosure is unlimited with regard to the particular napDNAbp that is employed in the adenine base editors of the disclosure.

[0191] Additional Cas9 sequences and structures are well known to those of skill in the art (see, e.g., “Complete genome sequence of an M1 strain of Streptococcus pyogenes.” Ferretti et al., J. J., McShan W. M., Ajdic D. J., Savic D. J., Savic G., Lyon K., Primeaux C., Sezate S., Suvorov A. N., Kenton S., Lai H. S., Lin S. P., Qian Y., Jia H. G., Najar F. Z., Ren Q., Zhu H., Song L., White J., Yuan X., Clifton S. W., Roe B. A., McLaughlin R. E., Proc. Natl. Acad. Sci. U.S.A. 98:4658-4663(2001); “CRISPR RNA maturation by trans-encoded small RNA and host factor RNase III.” Deltcheva E., Chylinski K., Sharma C. M., Gonzales K., Chao Y., Pirzada Z. A., Eckert M. R., Vogel J., Charpentier E., Nature 471:602-607(2011); and “A programmable dual-RNA-guided DNA endonuclease in adaptive bacterial immunity.” Jinek M., Chylinski K., Fonfara I., Hauer M., Doudna J. A., Charpentier E. Science 337:816-821(2012), the entire contents of each of which are incorporated herein by reference), and also provided below.

[0192] Examples of Cas9 and Cas9 equivalents are provided as follows; however, these specific examples are not meant to be limiting. The base editors of the present disclosure may use any suitable napDNAbp, including any suitable Cas9 or Cas9 equivalent.

[0193] A. Wild Type Canonical SpCas9

[0194] In one embodiment, the base editor constructs described herein may comprise the “canonical SpCas9” nuclease from S. pyogenes, which has been widely used as a tool for genome engineering. This Cas9 protein is a large, multi-domain protein containing two distinct nuclease domains. Point mutations can be introduced into Cas9 to abolish one or both nuclease activities, resulting in a nickase Cas9 (nCas9) or dead Cas9 (dCas9), respectively, that still retains its ability to bind DNA in a sgRNA-programmed manner. In principle, when fused to another protein or domain, Cas9 or variant thereof (e.g., nCas9) can target that protein to virtually any DNA sequence simply by co-expression with an appropriate sgRNA. As used herein, the canonical SpCas9 protein refers to the wild type protein from Streptococcus pyogenes having the following amino acid sequence:

| Description | Sequence | SEQ ID NO: |
|---|---|---|
| SpCas 9 | MDKKYSIGLDIGTNSVGWAVITDEYKVPSKKFKVLGNTDRHSIKKNLIGALLFDS | SEQ ID NO: |
| Streptococcus | GETAEATRLKRTARRRYTRRKNRICYLQEIFSNEMAKVDDSFFHRLEESFLVEED | 326 |
| pyogenes | KKHERHPIFGNIVDEVAYHEKYPTIYHLRKKLVDSTDKADLRLIYLALAHMIKFR | |
| M1 | GHFLIEGDLNPDNSDVDKLFIQLVQTYNQLFEENPINASGVDAKAILSARLSKSR | |
| SwissProt | RLENLIAQLPGEKKNGLFGNLIALSLGLTPNFKSNFDLAEDAKLQLSKDTYDDDL | |
| Accession | DNLLAQIGDQYADLFLAAKNLSDAILLSDILRVNTEITKAPLSASMIKRYDEHHQ | |
| No. Q99ZW2 | DLTLLKALVRQQLPEKYKEIFFDQSKNGYAGYIDGGASQEEFYKFIKPILEKMDG | |
| Wild type | TEELLVKLNREDLLRKQRTFDNGSIPHQIHLGELHAILRRQEDFYPFLKDNREKI | |
| | EKILTFRIPYYVGPLARGNSRFAWMTRKSEETITPWNFEEVVDKGASAQSFIERM | |
| | TNFDKNLPNEKVLPKHSLLYEYFTVYNELTKVKYVTEGMRKPAFLSGEQKKAIVD | |
| | LLFKTNRKVTVKQLKEDYFKKIECFDSVEISGVEDRFNASLGTYHDLLKIIKDKD | |
| | FLDNEENEDILEDIVLTLTLFEDREMIEERLKTYAHLFDDKVMKQLKRRRYTGWG | |
| | RLSRKLINGIRDKQSGKTILDFLKSDGFANRNFMQLIHDDSLTFKEDIQKAQVSG | |
| | QGDSLHEHIANLAGSPAIKKGILQTVKVVDELVKVMGRHKPENIVIEMARENQTT | |
| | QKGQKNSRERMKRIEEGIKELGSQILKEHPVENTQLQNEKLYLYYLQNGRDMYVD | |
| | QELDINRLSDYDVDHIVPQSFLKDDSIDNKVLTRSDKNRGKSDNVPSEEVVKKMK | |
| | NYWRQLLNAKLITQRKFDNLTKAERGGLSELDKAGFIKRQLVETRQITKHVAQIL | |
| | DSRMNTKYDENDKLIREVKVITLKSKLVSDFRKDFQFYKVREINNYHHAHDAYLN | |
| | AVVGTALIKKYPKLESEFVYGDYKVYDVRKMIAKSEQEIGKATAKYFFYSNIMNF | |
| | FKTEITLANGEIRKRPLIETNGETGEIVWDKGRDFATVRKVLSMPQVNIVKKTEV | |
| | QTGGFSKESILPKRNSDKLIARKKDWDPKKYGGFDSPTVAYSVLVVAKVEKGKSK | |
| | KLKSVKELLGITIMERSSFEKNPIDFLEAKGYKEVKKDLIIKLPKYSLFELENGR | |
| | KRMLASAGELQKGNELALPSKYVNFLYLASHYEKLKGSPEDNEQKQLFVEQHKHY | |
| | LDEIIEQISEFSKRVILADANLDKVLSAYNKHRDKPIREQAENIIHLFTLTNLGA | |
| | PAAFKYFDTTIDRKRYTSTKEVLDATLIHQSITGLYETRIDLSQLGGD | |
| SpCas 9 | ATGGATAAAAAATATAGCATTGGCCTGGATATTGGCACCAACAGCGTGGGCTGGG | SEQ ID NO: |
| Reverse | CGGTGATTACCGATGAATATAAAGTGCCGAGCAAAAAATTTAAAGTGCTGGGCAA | 327 |
| translation | CACCGATCGCCATAGCATTAAAAAAAACCTGATTGGCGCGCTGCTGTTTGATAGC | |
| of | GGCGAAACCGCGGAAGCGACCCGCCTGAAACGCACCGCGCGCCGCCGCTATACCC | |
| SwissProt | GCCGCAAAAACCGCATTTGCTATCTGCAGGAAATTTTTAGCAACGAAATGGCGAA | |
| Accession | AGTGGATGATAGCTTTTTTCATCGCCTGGAAGAAAGCTTTCTGGTGGAAGAAGAT | |
| No. Q99ZW2 | AAAAAACATGAACGCCATCCGATTTTTGGCAACATTGTGGATGAAGTGGCGTATC | |
| Streptococcus | ATGAAAAATATCCGACCATTTATCATCTGCGCAAAAAACTGGTGGATAGCACCGA | |
| pyogenes | TAAAGCGGATCTGCGCCTGATTTATCTGGCGCTGGCGCATATGATTAAATTTCGC | |
| | GGCCATTTTCTGATTGAAGGCGATCTGAACCCGGATAACAGCGATGTGGATAAAC | |
| | TGTTTATTCAGCTGGTGCAGACCTATAACCAGCTGTTTGAAGAAAACCCGATTAA | |
| | CGCGAGCGGCGTGGATGCGAAAGCGATTCTGAGCGCGCGCCTGAGCAAAAGCCGC | |
| | CGCCTGGAAAACCTGATTGCGCAGCTGCCGGGCGAAAAAAAAAACGGCCTGTTTG | |
| | GCAACCTGATTGCGCTGAGCCTGGGCCTGACCCCGAACTTTAAAAGCAACTTTGA | |
| | TCTGGCGGAAGATGCGAAACTGCAGCTGAGCAAAGATACCTATGATGATGATCTG | |
| | GATAACCTGCTGGCGCAGATTGGCGATCAGTATGCGGATCTGTTTCTGGCGGCGA | |
| | AAAACCTGAGCGATGCGATTCTGCTGAGCGATATTCTGCGCGTGAACACCGAAAT | |
| | TACCAAAGCGCCGCTGAGCGCGAGCATGATTAAACGCTATGATGAACATCATCAG | |
| | GATCTGACCCTGCTGAAAGCGCTGGTGCGCCAGCAGCTGCCGGAAAAATATAAAG | |
| | AAATTTTTTTTGATCAGAGCAAAAACGGCTATGCGGGCTATATTGATGGCGGCGC | |
| | GAGCCAGGAAGAATTTTATAAATTTATTAAACCGATTCTGGAAAAAATGGATGGC | |
| | ACCGAAGAACTGCTGGTGAAACTGAACCGCGAAGATCTGCTGCGCAAACAGCGCA | |
| | CCTTTGATAACGGCAGCATTCCGCATCAGATTCATCTGGGCGAACTGCATGCGAT | |
| | TCTGCGCCGCCAGGAAGATTTTTATCCGTTTCTGAAAGATAACCGCGAAAAAATT | |
| | GAAAAAATTCTGACCTTTCGCATTCCGTATTATGTGGGCCCGCTGGCGCGCGGCA | |
| | ACAGCCGCTTTGCGTGGATGACCCGCAAAAGCGAAGAAACCATTACCCCGTGGAA | |
| | CTTTGAAGAAGTGGTGGATAAAGGCGCGAGCGCGCAGAGCTTTATTGAACGCATG | |
| | ACCAACTTTGATAAAAACCTGCCGAACGAAAAAGTGCTGCCGAAACATAGCCTGC | |
| | TGTATGAATATTTTACCGTGTATAACGAACTGACCAAAGTGAAATATGTGACCGA | |
| | AGGCATGCGCAAACCGGCGTTTCTGAGCGGCGAACAGAAAAAAGCGATTGTGGAT | |
| | CTGCTGTTTAAAACCAACCGCAAAGTGACCGTGAAACAGCTGAAAGAAGATTATT | |
| | TTAAAAAAATTGAATGCTTTGATAGCGTGGAAATTAGCGGCGTGGAAGATCGCTT | |
| | TAACGCGAGCCTGGGCACCTATCATGATCTGCTGAAAATTATTAAAGATAAAGAT | |
| | TTTCTGGATAACGAAGAAAACGAAGATATTCTGGAAGATATTGTGCTGACCCTGA | |
| | CCCTGTTTGAAGATCGCGAAATGATTGAAGAACGCCTGAAAACCTATGCGCATCT | |
| | GTTTGATGATAAAGTGATGAAACAGCTGAAACGCCGCCGCTATACCGGCTGGGGC | |
| | CGCCTGAGCCGCAAACTGATTAACGGCATTCGCGATAAACAGAGCGGCAAAACCA | |
| | TTCTGGATTTTCTGAAAAGCGATGGCTTTGCGAACCGCAACTTTATGCAGCTGAT | |
| | TCATGATGATAGCCTGACCTTTAAAGAAGATATTCAGAAAGCGCAGGTGAGCGGC | |
| | CAGGGCGATAGCCTGCATGAACATATTGCGAACCTGGCGGGCAGCCCGGCGATTA | |
| | AAAAAGGCATTCTGCAGACCGTGAAAGTGGTGGATGAACTGGTGAAAGTGATGGG | |
| | CCGCCATAAACCGGAAAACATTGTGATTGAAATGGCGCGCGAAAACCAGACCACC | |
| | CAGAAAGGCCAGAAAAACAGCCGCGAACGCATGAAACGCATTGAAGAAGGCATTA | |
| | AAGAACTGGGCAGCCAGATTCTGAAAGAACATCCGGTGGAAAACACCCAGCTGCA | |
| | GAACGAAAAACTGTATCTGTATTATCTGCAGAACGGCCGCGATATGTATGTGGAT | |
| | CAGGAACTGGATATTAACCGCCTGAGCGATTATGATGTGGATCATATTGTGCCGC | |
| | AGAGCTTTCTGAAAGATGATAGCATTGATAACAAAGTGCTGACCCGCAGCGATAA | |
| | AAACCGCGGCAAAAGCGATAACGTGCCGAGCGAAGAAGTGGTGAAAAAAATGAAA | |
| | AACTATTGGCGCCAGCTGCTGAACGCGAAACTGATTACCCAGCGCAAATTTGATA | |
| | ACCTGACCAAAGCGGAACGCGGCGGCCTGAGCGAACTGGATAAAGCGGGCTTTAT | |
| | TAAACGCCAGCTGGTGGAAACCCGCCAGATTACCAAACATGTGGCGCAGATTCTG | |
| | GATAGCCGCATGAACACCAAATATGATGAAAACGATAAACTGATTCGCGAAGTGA | |
| | AAGTGATTACCCTGAAAAGCAAACTGGTGAGCGATTTTCGCAAAGATTTTCAGTT | |
| | TTATAAAGTGCGCGAAATTAACAACTATCATCATGCGCATGATGCGTATCTGAAC | |
| | GCGGTGGTGGGCACCGCGCTGATTAAAAAATATCCGAAACTGGAAAGCGAATTTG | |
| | TGTATGGCGATTATAAAGTGTATGATGTGCGCAAAATGATTGCGAAAAGCGAACA | |
| | GGAAATTGGCAAAGCGACCGCGAAATATTTTTTTTATAGCAACATTATGAACTTT | |
| | TTTAAAACCGAAATTACCCTGGCGAACGGCGAAATTCGCAAACGCCCGCTGATTG | |
| | AAACCAACGGCGAAACCGGCGAAATTGTGTGGGATAAAGGCCGCGATTTTGCGAC | |
| | CGTGCGCAAAGTGCTGAGCATGCCGCAGGTGAACATTGTGAAAAAAACCGAAGTG | |
| | CAGACCGGCGGCTTTAGCAAAGAAAGCATTCTGCCGAAACGCAACAGCGATAAAC | |
| | TGATTGCGCGCAAAAAAGATTGGGATCCGAAAAAATATGGCGGCTTTGATAGCCC | |
| | GACCGTGGCGTATAGCGTGCTGGTGGTGGCGAAAGTGGAAAAAGGCAAAAGCAAA | |
| | AAACTGAAAAGCGTGAAAGAACTGCTGGGCATTACCATTATGGAACGCAGCAGCT | |
| | TTGAAAAAAACCCGATTGATTTTCTGGAAGCGAAAGGCTATAAAGAAGTGAAAAA | |
| | AGATCTGATTATTAAACTGCCGAAATATAGCCTGTTTGAACTGGAAAACGGCCGC | |
| | AAACGCATGCTGGCGAGCGCGGGCGAACTGCAGAAAGGCAACGAACTGGCGCTGC | |
| | CGAGCAAATATGTGAACTTTCTGTATCTGGCGAGCCATTATGAAAAACTGAAAGG | |
| | CAGCCCGGAAGATAACGAACAGAAACAGCTGTTTGTGGAACAGCATAAACATTAT | |
| | CTGGATGAAATTATTGAACAGATTAGCGAATTTAGCAAACGCGTGATTCTGGCGG | |
| | ATGCGAACCTGGATAAAGTGCTGAGCGCGTATAACAAACATCGCGATAAACCGAT | |
| | TCGCGAACAGGCGGAAAACATTATTCATCTGTTTACCCTGACCAACCTGGGCGCG | |
| | CCGGCGGCGTTTAAATATTTTGATACCACCATTGATCGCAAACGCTATACCAGCA | |
| | CCAAAGAAGTGCTGGATGCGACCCTGATTCATCAGAGCATTACCGGCCTGTATGA | |
| | AACCCGCATTGATCTGAGCCAGCTGGGCGGCGAT | |

[0195] The base editors described herein may include canonical SpCas9, or any variant thereof having at least 80%, at least 85%, at least 90%, at least 95%, or at least 99% sequence identity with a wild type Cas9 sequence provided above. These variants may include SpCas9 variants containing one or more mutations, including any known mutation reported with the SwissProt Accession No. Q99ZW2 entry, which include:

| SpCas9 mutation (relative to | Function/Characteristic (as reported) |
|---|---|
| the amino acid sequence | (see UniProtKB - Q99ZW2 |
| of the canonical SpCas9 | (CAS9_STRPT1) entry - |
| sequence, SEQ ID NO: 5) | incorporated herein by reference) |
| D10A | Nickase mutant which cleaves the |
| | protospacer strand (but no cleavage of |
| | non-protospacer strand) |
| S15A | Decreased DNA cleavage activity |
| R66A | Decreased DNA cleavage activity |
| R70A | No DNA cleavage |
| R74A | Decreased DNA cleavage |
| R78A | Decreased DNA cleavage |
| 97-150 deletion | No nuclease activity |
| R165A | Decreased DNA cleavage |
| 175-307 deletion | About 50% decreased DNA cleavage |
| 312-409 deletion | No nuclease activity |
| E762A | Nickase |
| H840A | Nickase mutant which cleaves the non- |
| | protospacer strand but does not cleave |
| | the protospacer strand |
| N854A | Nickase |
| N863A | Nickase |
| H982A | Decreased DNA cleavage |
| D986A | Nickase |
| 1099-1368 deletion | No nuclease activity |
| R1333A | Reduced DNA binding |

[0196] Other wild type SpCas9 sequences that may be used in the present disclosure, include:

| Description | Sequence | SEQ ID NO: |
|---|---|---|
| SpCas9 | ATGGATAAGAAATACTCAATAGGCTTAGATATCGGCACAAATAGCGTCGGATGGGCGGT | SEQ ID NO: |
| Streptococcus | GATCACTGATGATTATAAGGTTCCGTCTAAAAAGTTCAAGGTTCTGGGAAATACAGACC | 328 |
| pyogenes | GCCACAGTATCAAAAAAAATCTTATAGGGGCTCTTTTATTTGGCAGTGGAGAGACAGCG | |
| MGAS1882 wild | GAAGCGACTCGTCTCAAACGGACAGCTCGTAGAAGGTATACACGTCGGAAGAATCGTAT | |
| type | TTGTTATCTACAGGAGATTTTTTCAAATGAGATGGCGAAAGTAGATGATAGTTTCTTTC | |
| NC_017053.1 | ATCGACTTGAAGAGTCTTTTTTGGTGGAAGAAGACAAGAAGCATGAACGTCATCCTATT | |
| | TTTGGAAATATAGTAGATGAAGTTGCTTATCATGAGAAATATCCAACTATCTATCATCT | |
| | GCGAAAAAAATTGGCAGATTCTACTGATAAAGCGGATTTGCGCTTAATCTATTTGGCCT | |
| | TAGCGCATATGATTAAGTTTCGTGGTCATTTTTTGATTGAGGGAGATTTAAATCCTGAT | |
| | AATAGTGATGTGGACAAACTATTTATCCAGTTGGTACAAATCTACAATCAATTATTTGA | |
| | AGAAAACCCTATTAACGCAAGTAGAGTAGATGCTAAAGCGATTCTTTCTGCACGATTGA | |
| | GTAAATCAAGACGATTAGAAAATCTCATTGCTCAGCTCCCCGGTGAGAAGAGAAATGGC | |
| | TTGTTTGGGAATCTCATTGCTTTGTCATTGGGATTGACCCCTAATTTTAAATCAAATTT | |
| | TGATTTGGCAGAAGATGCTAAATTACAGCTTTCAAAAGATACTTACGATGATGATTTAG | |
| | ATAATTTATTGGCGCAAATTGGAGATCAATATGCTGATTTGTTTTTGGCAGCTAAGAAT | |
| | TTATCAGATGCTATTTTACTTTCAGATATCCTAAGAGTAAATAGTGAAATAACTAAGGC | |
| | TCCCCTATCAGCTTCAATGATTAAGCGCTACGATGAACATCATCAAGACTTGACTCTTT | |
| | TAAAAGCTTTAGTTCGACAACAACTTCCAGAAAAGTATAAAGAAATCTTTTTTGATCAA | |
| | TCAAAAAACGGATATGCAGGTTATATTGATGGGGGAGCTAGCCAAGAAGAATTTTATAA | |
| | ATTTATCAAACCAATTTTAGAAAAAATGGATGGTACTGAGGAATTATTGGTGAAACTAA | |
| | ATCGTGAAGATTTGCTGCGCAAGCAACGGACCTTTGACAACGGCTCTATTCCCCATCAA | |
| | ATTCACTTGGGTGAGCTGCATGCTATTTTGAGAAGACAAGAAGACTTTTATCCATTTTT | |
| | AAAAGACAATCGTGAGAAGATTGAAAAAATCTTGACTTTTCGAATTCCTTATTATGTTG | |
| | GTCCATTGGCGCGTGGCAATAGTCGTTTTGCATGGATGACTCGGAAGTCTGAAGAAACA | |
| | ATTACCCCATGGAATTTTGAAGAAGTTGTCGATAAAGGTGCTTCAGCTCAATCATTTAT | |
| | TGAACGCATGACAAACTTTGATAAAAATCTTCCAAATGAAAAAGTACTACCAAAACATA | |
| | GTTTGCTTTATGAGTATTTTACGGTTTATAACGAATTGACAAAGGTCAAATATGTTACT | |
| | GAGGGAATGCGAAAACCAGCATTTCTTTCAGGTGAACAGAAGAAAGCCATTGTTGATTT | |
| | ACTCTTCAAAACAAATCGAAAAGTAACCGTTAAGCAATTAAAAGAAGATTATTTCAAAA | |
| | AAATAGAATGTTTTGATAGTGTTGAAATTTCAGGAGTTGAAGATAGATTTAATGCTTCA | |
| | TTAGGCGCCTACCATGATTTGCTAAAAATTATTAAAGATAAAGATTTTTTGGATAATGA | |
| | AGAAAATGAAGATATCTTAGAGGATATTGTTTTAACATTGACCTTATTTGAAGATAGGG | |
| | GGATGATTGAGGAAAGACTTAAAACATATGCTCACCTCTTTGATGATAAGGTGATGAAA | |
| | CAGCTTAAACGTCGCCGTTATACTGGTTGGGGACGTTTGTCTCGAAAATTGATTAATGG | |
| | TATTAGGGATAAGCAATCTGGCAAAACAATATTAGATTTTTTGAAATCAGATGGTTTTG | |
| | CCAATCGCAATTTTATGCAGCTGATCCATGATGATAGTTTGACATTTAAAGAAGATATT | |
| | CAAAAAGCACAGGTGTCTGGACAAGGCCATAGTTTACATGAACAGATTGCTAACTTAGC | |
| | TGGCAGTCCTGCTATTAAAAAAGGTATTTTACAGACTGTAAAAATTGTTGATGAACTGG | |
| | TCAAAGTAATGGGGCATAAGCCAGAAAATATCGTTATTGAAATGGCACGTGAAAATCAG | |
| | ACAACTCAAAAGGGCCAGAAAAATTCGCGAGAGCGTATGAAACGAATCGAAGAAGGTAT | |
| | CAAAGAATTAGGAAGTCAGATTCTTAAAGAGCATCCTGTTGAAAATACTCAATTGCAAA | |
| | ATGAAAAGCTCTATCTCTATTATCTACAAAATGGAAGAGACATGTATGTGGACCAAGAA | |
| | TTAGATATTAATCGTTTAAGTGATTATGATGTCGATCACATTGTTCCACAAAGTTTCAT | |
| | TAAAGACGATTCAATAGACAATAAGGTACTAACGCGTTCTGATAAAAATCGTGGTAAAT | |
| | CGGATAACGTTCCAAGTGAAGAAGTAGTCAAAAAGATGAAAAACTATTGGAGACAACTT | |
| | CTAAACGCCAAGTTAATCACTCAACGTAAGTTTGATAATTTAACGAAAGCTGAACGTGG | |
| | AGGTTTGAGTGAACTTGATAAAGCTGGTTTTATCAAACGCCAATTGGTTGAAACTCGCC | |
| | AAATCACTAAGCATGTGGCACAAATTTTGGATAGTCGCATGAATACTAAATACGATGAA | |
| | AATGATAAACTTATTCGAGAGGTTAAAGTGATTACCTTAAAATCTAAATTAGTTTCTGA | |
| | CTTCCGAAAAGATTTCCAATTCTATAAAGTACGTGAGATTAACAATTACCATCATGCCC | |
| | ATGATGCGTATCTAAATGCCGTCGTTGGAACTGCTTTGATTAAGAAATATCCAAAACTT | |
| | GAATCGGAGTTTGTCTATGGTGATTATAAAGTTTATGATGTTCGTAAAATGATTGCTAA | |
| | GTCTGAGCAAGAAATAGGCAAAGCAACCGCAAAATATTTCTTTTACTCTAATATCATGA | |
| | ACTTCTTCAAAACAGAAATTACACTTGCAAATGGAGAGATTCGCAAACGCCCTCTAATC | |
| | GAAACTAATGGGGAAACTGGAGAAATTGTCTGGGATAAAGGGCGAGATTTTGCCACAGT | |
| | GCGCAAAGTATTGTCCATGCCCCAAGTCAATATTGTCAAGAAAACAGAAGTACAGACAG | |
| | GCGGATTCTCCAAGGAGTCAATTTTACCAAAAAGAAATTCGGACAAGCTTATTGCTCGT | |
| | AAAAAAGACTGGGATCCAAAAAAATATGGTGGTTTTGATAGTCCAACGGTAGCTTATTC | |
| | AGTCCTAGTGGTTGCTAAGGTGGAAAAAGGGAAATCGAAGAAGTTAAAATCCGTTAAAG | |
| | AGTTACTAGGGATCACAATTATGGAAAGAAGTTCCTTTGAAAAAAATCCGATTGACTTT | |
| | TTAGAAGCTAAAGGATATAAGGAAGTTAAAAAAGACTTAATCATTAAACTACCTAAATA | |
| | TAGTCTTTTTGAGTTAGAAAACGGTCGTAAACGGATGCTGGCTAGTGCCGGAGAATTAC | |
| | AAAAAGGAAATGAGCTGGCTCTGCCAAGCAAATATGTGAATTTTTTATATTTAGCTAGT | |
| | CATTATGAAAAGTTGAAGGGTAGTCCAGAAGATAACGAACAAAAACAATTGTTTGTGGA | |
| | GCAGCATAAGCATTATTTAGATGAGATTATTGAGCAAATCAGTGAATTTTCTAAGCGTG | |
| | TTATTTTAGCAGATGCCAATTTAGATAAAGTTCTTAGTGCATATAACAAACATAGAGAC | |
| | AAACCAATACGTGAACAAGCAGAAAATATTATTCATTTATTTACGTTGACGAATCTTGG | |
| | AGCTCCCGCTGCTTTTAAATATTTTGATACAACAATTGATCGTAAACGATATACGTCTA | |
| | CAAAAGAAGTTTTAGATGCCACTCTTATCCATCAATCCATCACTGGTCTTTATGAAACA | |
| | CGCATTGATTTGAGTCAGCTAGGAGGTGACTGA | |
| SpCas9 | MDKKYSIGLDIGTNSVGWAVITDDYKVPSKKFKVLGNTDRHSIKKNLIGALLFGSGETA | SEQ ID NO: |
| Streptococcus | EATRLKRTARRRYTRRKNRICYLQEIFSNEMAKVDDSFFHRLEESFLVEEDKKHERHPI | 329 |
| pyogenes | FGNIVDEVAYHEKYPTIYHLRKKLADSTDKADLRLIYLALAHMIKFRGHFLIEGDLNPD | |
| MGAS1882 wild | NSDVDKLFIQLVQIYNQLFEENPINASRVDAKAILSARLSKSRRLENLIAQLPGEKRNG | |
| type | LFGNLIALSLGLTPNFKSNFDLAEDAKLQLSKDTYDDDLDNLLAQIGDQYADLFLAAKN | |
| NC_017053.1 | LSDAILLSDILRVNSEITKAPLSASMIKRYDEHHQDLTLLKALVRQQLPEKYKEIFFDQ | |
| | SKNGYAGYIDGGASQEEFYKFIKPILEKMDGTEELLVKLNREDLLRKQRTFDNGSIPHQ | |
| | IHLGELHAILRRQEDFYPFLKDNREKIEKILTFRIPYYVGPLARGNSRFAWMTRKSEET | |
| | ITPWNFEEVVDKGASAQSFIERMTNFDKNLPNEKVLPKHSLLYEYFTVYNELTKVKYVT | |
| | EGMRKPAFLSGEQKKAIVDLLFKTNRKVTVKQLKEDYFKKIECFDSVEISGVEDRFNAS | |
| | LGAYHDLLKIIKDKDFLDNEENEDILEDIVLTLTLFEDRGMIEERLKTYAHLFDDKVMK | |
| | QLKRRRYTGWGRLSRKLINGIRDKQSGKTILDFLKSDGFANRNFMQLIHDDSLTFKEDI | |
| | QKAQVSGQGHSLHEQIANLAGSPAIKKGILQTVKIVDELVKVMGHKPENIVIEMARENQ | |
| | TTQKGQKNSRERMKRIEEGIKELGSQILKEHPVENTQLQNEKLYLYYLQNGRDMYVDQE | |
| | LDINRLSDYDVDHIVPQSFIKDDSIDNKVLTRSDKNRGKSDNVPSEEVVKKMKNYWRQL | |
| | LNAKLITQRKFDNLTKAERGGLSELDKAGFIKRQLVETRQITKHVAQILDSRMNTKYDE | |
| | NDKLIREVKVITLKSKLVSDFRKDFQFYKVREINNYHHAHDAYLNAVVGTALIKKYPKL | |
| | ESEFVYGDYKVYDVRKMIAKSEQEIGKATAKYFFYSNIMNFFKTEITLANGEIRKRPLI | |
| | ETNGETGEIVWDKGRDFATVRKVLSMPQVNIVKKTEVQTGGFSKESILPKRNSDKLIAR | |
| | KKDWDPKKYGGFDSPTVAYSVLVVAKVEKGKSKKLKSVKELLGITIMERSSFEKNPIDF | |
| | LEAKGYKEVKKDLIIKLPKYSLFELENGRKRMLASAGELQKGNELALPSKYVNFLYLAS | |
| | HYEKLKGSPEDNEQKQLFVEQHKHYLDEIIEQISEFSKRVILADANLDKVLSAYNKHRD | |
| | KPIREQAENIIHLFTLTNLGAPAAFKYFDTTIDRKRYTSTKEVLDATLIHQSITGLYET | |
| | RIDLSQLGGD | |
| SpCas9 | ATGGATAAAAAGTATTCTATTGGTTTAGACATCGGCACTAATTCCGTTGGATGGGCTGT | SEQ ID NO: |
| Streptococcus | CATAACCGATGAATACAAAGTACCTTCAAAGAAATTTAAGGTGTTGGGGAACACAGACC | 330 |
| pyogenes wild | GTCATTCGATTAAAAAGAATCTTATCGGTGCCCTCCTATTCGATAGTGGCGAAACGGCA | |
| type | GAGGCGACTCGCCTGAAACGAACCGCTCGGAGAAGGTATACACGTCGCAAGAACCGAAT | |
| SWBC2D7W014 | ATGTTACTTACAAGAAATTTTTAGCAATGAGATGGCCAAAGTTGACGATTCTTTCTTTC | |
| | ACCGTTTGGAAGAGTCCTTCCTTGTCGAAGAGGACAAGAAACATGAACGGCACCCCATC | |
| | TTTGGAAACATAGTAGATGAGGTGGCATATCATGAAAAGTACCCAACGATTTATCACCT | |
| | CAGAAAAAAGCTAGTTGACTCAACTGATAAAGCGGACCTGAGGTTAATCTACTTGGCTC | |
| | TTGCCCATATGATAAAGTTCCGTGGGCACTTTCTCATTGAGGGTGATCTAAATCCGGAC | |
| | AACTCGGATGTCGACAAACTGTTCATCCAGTTAGTACAAACCTATAATCAGTTGTTTGA | |
| | AGAGAACCCTATAAATGCAAGTGGCGTGGATGCGAAGGCTATTCTTAGCGCCCGCCTCT | |
| | CTAAATCCCGACGGCTAGAAAACCTGATCGCACAATTACCCGGAGAGAAGAAAAATGGG | |
| | TTGTTCGGTAACCTTATAGCGCTCTCACTAGGCCTGACACCAAATTTTAAGTCGAACTT | |
| | CGACTTAGCTGAAGATGCCAAATTGCAGCTTAGTAAGGACACGTACGATGACGATCTCG | |
| | ACAATCTACTGGCACAAATTGGAGATCAGTATGCGGACTTATTTTTGGCTGCCAAAAAC | |
| | CTTAGCGATGCAATCCTCCTATCTGACATACTGAGAGTTAATACTGAGATTACCAAGGC | |
| | GCCGTTATCCGCTTCAATGATCAAAAGGTACGATGAACATCACCAAGACTTGACACTTC | |
| | TCAAGGCCCTAGTCCGTCAGCAACTGCCTGAGAAATATAAGGAAATATTCTTTGATCAG | |
| | TCGAAAAACGGGTACGCAGGTTATATTGACGGCGGAGCGAGTCAAGAGGAATTCTACAA | |
| | GTTTATCAAACCCATATTAGAGAAGATGGATGGGACGGAAGAGTTGCTTGTAAAACTCA | |
| | ATCGCGAAGATCTACTGCGAAAGCAGCGGACTTTCGACAACGGTAGCATTCCACATCAA | |
| | ATCCACTTAGGCGAATTGCATGCTATACTTAGAAGGCAGGAGGATTTTTATCCGTTCCT | |
| | CAAAGACAATCGTGAAAAGATTGAGAAAATCCTAACCTTTCGCATACCTTACTATGTGG | |
| | GACCCCTGGCCCGAGGGAACTCTCGGTTCGCATGGATGACAAGAAAGTCCGAAGAAACG | |
| | ATTACTCCATGGAATTTTGAGGAAGTTGTCGATAAAGGTGCGTCAGCTCAATCGTTCAT | |
| | CGAGAGGATGACCAACTTTGACAAGAATTTACCGAACGAAAAAGTATTGCCTAAGCACA | |
| | GTTTACTTTACGAGTATTTCACAGTGTACAATGAACTCACGAAAGTTAAGTATGTCACT | |
| | GAGGGCATGCGTAAACCCGCCTTTCTAAGCGGAGAACAGAAGAAAGCAATAGTAGATCT | |
| | GTTATTCAAGACCAACCGCAAAGTGACAGTTAAGCAATTGAAAGAGGACTACTTTAAGA | |
| | AAATTGAATGCTTCGATTCTGTCGAGATCTCCGGGGTAGAAGATCGATTTAATGCGTCA | |
| | CTTGGTACGTATCATGACCTCCTAAAGATAATTAAAGATAAGGACTTCCTGGATAACGA | |
| | AGAGAATGAAGATATCTTAGAAGATATAGTGTTGACTCTTACCCTCTTTGAAGATCGGG | |
| | AAATGATTGAGGAAAGACTAAAAACATACGCTCACCTGTTCGACGATAAGGTTATGAAA | |
| | CAGTTAAAGAGGCGTCGCTATACGGGCTGGGGACGATTGTCGCGGAAACTTATCAACGG | |
| | GATAAGAGACAAGCAAAGTGGTAAAACTATTCTCGATTTTCTAAAGAGCGACGGCTTCG | |
| | CCAATAGGAACTTTATGCAGCTGATCCATGATGACTCTTTAACCTTCAAAGAGGATATA | |
| | CAAAAGGCACAGGTTTCCGGACAAGGGGACTCATTGCACGAACATATTGCGAATCTTGC | |
| | TGGTTCGCCAGCCATCAAAAAGGGCATACTCCAGACAGTCAAAGTAGTGGATGAGCTAG | |
| | TTAAGGTCATGGGACGTCACAAACCGGAAAACATTGTAATCGAGATGGCACGCGAAAAT | |
| | CAAACGACTCAGAAGGGGCAAAAAAACAGTCGAGAGCGGATGAAGAGAATAGAAGAGGG | |
| | TATTAAAGAACTGGGCAGCCAGATCTTAAAGGAGCATCCTGTGGAAAATACCCAATTGC | |
| | AGAACGAGAAACTTTACCTCTATTACCTACAAAATGGAAGGGACATGTATGTTGATCAG | |
| | GAACTGGACATAAACCGTTTATCTGATTACGACGTCGATCACATTGTACCCCAATCCTT | |
| | TTTGAAGGACGATTCAATCGACAATAAAGTGCTTACACGCTCGGATAAGAACCGAGGGA | |
| | AAAGTGACAATGTTCCAAGCGAGGAAGTCGTAAAGAAAATGAAGAACTATTGGCGGCAG | |
| | CTCCTAAATGCGAAACTGATAACGCAAAGAAAGTTCGATAACTTAACTAAAGCTGAGAG | |
| | GGGTGGCTTGTCTGAACTTGACAAGGCCGGATTTATTAAACGTCAGCTCGTGGAAACCC | |
| | GCCAAATCACAAAGCATGTTGCACAGATACTAGATTCCCGAATGAATACGAAATACGAC | |
| | GAGAACGATAAGCTGATTCGGGAAGTCAAAGTAATCACTTTAAAGTCAAAATTGGTGTC | |
| | GGACTTCAGAAAGGATTTTCAATTCTATAAAGTTAGGGAGATAAATAACTACCACCATG | |
| | CGCACGACGCTTATCTTAATGCCGTCGTAGGGACCGCACTCATTAAGAAATACCCGAAG | |
| | CTAGAAAGTGAGTTTGTGTATGGTGATTACAAAGTTTATGACGTCCGTAAGATGATCGC | |
| | GAAAAGCGAACAGGAGATAGGCAAGGCTACAGCCAAATACTTCTTTTATTCTAACATTA | |
| | TGAATTTCTTTAAGACGGAAATCACTCTGGCAAACGGAGAGATACGCAAACGACCTTTA | |
| | ATTGAAACCAATGGGGAGACAGGTGAAATCGTATGGGATAAGGGCCGGGACTTCGCGAC | |
| | GGTGAGAAAAGTTTTGTCCATGCCCCAAGTCAACATAGTAAAGAAAACTGAGGTGCAGA | |
| | CCGGAGGGTTTTCAAAGGAATCGATTCTTCCAAAAAGGAATAGTGATAAGCTCATCGCT | |
| | CGTAAAAAGGACTGGGACCCGAAAAAGTACGGTGGCTTCGATAGCCCTACAGTTGCCTA | |
| | TTCTGTCCTAGTAGTGGCAAAAGTTGAGAAGGGAAAATCCAAGAAACTGAAGTCAGTCA | |
| | AAGAATTATTGGGGATAACGATTATGGAGCGCTCGTCTTTTGAAAAGAACCCCATCGAC | |
| | TTCCTTGAGGCGAAAGGTTACAAGGAAGTAAAAAAGGATCTCATAATTAAACTACCAAA | |
| | GTATAGTCTGTTTGAGTTAGAAAATGGCCGAAAACGGATGTTGGCTAGCGCCGGAGAGC | |
| | TTCAAAAGGGGAACGAACTCGCACTACCGTCTAAATACGTGAATTTCCTGTATTTAGCG | |
| | TCCCATTACGAGAAGTTGAAAGGTTCACCTGAAGATAACGAACAGAAGCAACTTTTTGT | |
| | TGAGCAGCACAAACATTATCTCGACGAAATCATAGAGCAAATTTCGGAATTCAGTAAGA | |
| | GAGTCATCCTAGCTGATGCCAATCTGGACAAAGTATTAAGCGCATACAACAAGCACAGG | |
| | GATAAACCCATACGTGAGCAGGCGGAAAATATTATCCATTTGTTTACTCTTACCAACCT | |
| | CGGCGCTCCAGCCGCATTCAAGTATTTTGACACAACGATAGATCGCAAACGATACACTT | |
| | CTACCAAGGAGGTGCTAGACGCGACACTGATTCACCAATCCATCACGGGATTATATGAA | |
| | ACTCGGATAGATTTGTCACAGCTTGGGGGTGACGGATCCCCCAAGAAGAAGAGGAAAGT | |
| | CTCGAGCGACTACAAAGACCATGACGGTGATTATAAAGATCATGACATCGATTACAAGG | |
| | ATGACGATGACAAGGCTGCAGGA | |
| SpCas9 | MDKKYSIGLDIGTNSVGWAVITDEYKVPSKKFKVLGNTDRHSIKKNLIGALLFDSGETA | SEQ ID NO: |
| Streptococcus | EATRLKRTARRRYTRRKNRICYLQEIFSNEMAKVDDSFFHRLEESFLVEEDKKHERHPI | 331 |
| pyogenes wild | FGNIVDEVAYHEKYPTIYHLRKKLVDSTDKADLRLIYLALAHMIKFRGHFLIEGDLNPD | |
| type | NSDVDKLFIQLVQTYNQLFEENPINASGVDAKAILSARLSKSRRLENLIAQLPGEKKNG | |
| Encoded | LFGNLIALSLGLTPNFKSNFDLAEDAKLQLSKDTYDDDLDNLLAQIGDQYADLFLAAKN | |
| product of | LSDAILLSDILRVNTEITKAPLSASMIKRYDEHHQDLTLLKALVRQQLPEKYKEIFFDQ | |
| SWBC2D7W014 | SKNGYAGYIDGGASQEEFYKFIKPILEKMDGTEELLVKLNREDLLRKQRTFDNGSIPHQ | |
| | IHLGELHAILRRQEDFYPFLKDNREKIEKILTFRIPYYVGPLARGNSRFAWMTRKSEET | |
| | ITPWNFEEVVDKGASAQSFIERMTNFDKNLPNEKVLPKHSLLYEYFTVYNELTKVKYVT | |
| | EGMRKPAFLSGEQKKAIVDLLFKTNRKVTVKQLKEDYFKKIECFDSVEISGVEDRFNAS | |
| | LGTYHDLLKIIKDKDFLDNEENEDILEDIVLTLTLFEDREMIEERLKTYAHLFDDKVMK | |
| | QLKRRRYTGWGRLSRKLINGIRDKQSGKTILDFLKSDGFANRNFMQLIHDDSLTFKEDI | |
| | QKAQVSGQGDSLHEHIANLAGSPAIKKGILQTVKVVDELVKVMGRHKPENIVIEMAREN | |
| | QTTQKGQKNSRERMKRIEEGIKELGSQILKEHPVENTQLQNEKLYLYYLQNGRDMYVDQ | |
| | ELDINRLSDYDVDHIVPQSFLKDDSIDNKVLTRSDKNRGKSDNVPSEEVVKKMKNYWRQ | |
| | LLNAKLITQRKFDNLTKAERGGLSELDKAGFIKRQLVETRQITKHVAQILDSRMNTKYD | |
| | ENDKLIREVKVITLKSKLVSDFRKDFQFYKVREINNYHHAHDAYLNAVVGTALIKKYPK | |
| | LESEFVYGDYKVYDVRKMIAKSEQEIGKATAKYFFYSNIMNFFKTEITLANGEIRKRPL | |
| | IETNGETGEIVWDKGRDFATVRKVLSMPQVNIVKKTEVQTGGFSKESILPKRNSDKLIA | |
| | RKKDWDPKKYGGFDSPTVAYSVLVVAKVEKGKSKKLKSVKELLGITIMERSSFEKNPID | |
| | FLEAKGYKEVKKDLIIKLPKYSLFELENGRKRMLASAGELQKGNELALPSKYVNFLYLA | |
| | SHYEKLKGSPEDNEQKQLFVEQHKHYLDEIIEQISEFSKRVILADANLDKVLSAYNKHR | |
| | DKPIREQAENIIHLFTLTNLGAPAAFKYFDTTIDRKRYTSTKEVLDATLIHQSITGLYE | |
| | TRIDLSQLGGDGSPKKKRKVSSDYKDHDGDYKDHDIDYKDDDDKAAG | |
| SpCas9 | ATGGATAAGAAATACTCAATAGGCTTAGATATCGGCACAAATAGCGTCGGATGGGCGGT | SEQ ID NO: |
| Streptococcus | GATCACTGATGAATATAAGGTTCCGTCTAAAAAGTTCAAGGTTCTGGGAAATACAGACC | 332 |
| pyogenes | GCCACAGTATCAAAAAAAATCTTATAGGGGCTCTTTTATTTGACAGTGGAGAGACAGCG | |
| M1 GAS wild | GAAGCGACTCGTCTCAAACGGACAGCTCGTAGAAGGTATACACGTCGGAAGAATCGTAT | |
| type | TTGTTATCTACAGGAGATTTTTTCAAATGAGATGGCGAAAGTAGATGATAGTTTCTTTC | |
| NC_002737.2 | ATCGACTTGAAGAGTCTTTTTTGGTGGAAGAAGACAAGAAGCATGAACGTCATCCTATT | |
| | TTTGGAAATATAGTAGATGAAGTTGCTTATCATGAGAAATATCCAACTATCTATCATCT | |
| | GCGAAAAAAATTGGTAGATTCTACTGATAAAGCGGATTTGCGCTTAATCTATTTGGCCT | |
| | TAGCGCATATGATTAAGTTTCGTGGTCATTTTTTGATTGAGGGAGATTTAAATCCTGAT | |
| | AATAGTGATGTGGACAAACTATTTATCCAGTTGGTACAAACCTACAATCAATTATTTGA | |
| | AGAAAACCCTATTAACGCAAGTGGAGTAGATGCTAAAGCGATTCTTTCTGCACGATTGA | |
| | GTAAATCAAGACGATTAGAAAATCTCATTGCTCAGCTCCCCGGTGAGAAGAAAAATGGC | |
| | TTATTTGGGAATCTCATTGCTTTGTCATTGGGTTTGACCCCTAATTTTAAATCAAATTT | |
| | TGATTTGGCAGAAGATGCTAAATTACAGCTTTCAAAAGATACTTACGATGATGATTTAG | |
| | ATAATTTATTGGCGCAAATTGGAGATCAATATGCTGATTTGTTTTTGGCAGCTAAGAAT | |
| | TTATCAGATGCTATTTTACTTTCAGATATCCTAAGAGTAAATACTGAAATAACTAAGGC | |
| | TCCCCTATCAGCTTCAATGATTAAACGCTACGATGAACATCATCAAGACTTGACTCTTT | |
| | TAAAAGCTTTAGTTCGACAACAACTTCCAGAAAAGTATAAAGAAATCTTTTTTGATCAA | |
| | TCAAAAAACGGATATGCAGGTTATATTGATGGGGGAGCTAGCCAAGAAGAATTTTATAA | |
| | ATTTATCAAACCAATTTTAGAAAAAATGGATGGTACTGAGGAATTATTGGTGAAACTAA | |
| | ATCGTGAAGATTTGCTGCGCAAGCAACGGACCTTTGACAACGGCTCTATTCCCCATCAA | |
| | ATTCACTTGGGTGAGCTGCATGCTATTTTGAGAAGACAAGAAGACTTTTATCCATTTTT | |
| | AAAAGACAATCGTGAGAAGATTGAAAAAATCTTGACTTTTCGAATTCCTTATTATGTTG | |
| | GTCCATTGGCGCGTGGCAATAGTCGTTTTGCATGGATGACTCGGAAGTCTGAAGAAACA | |
| | ATTACCCCATGGAATTTTGAAGAAGTTGTCGATAAAGGTGCTTCAGCTCAATCATTTAT | |
| | TGAACGCATGACAAACTTTGATAAAAATCTTCCAAATGAAAAAGTACTACCAAAACATA | |
| | GTTTGCTTTATGAGTATTTTACGGTTTATAACGAATTGACAAAGGTCAAATATGTTACT | |
| | GAAGGAATGCGAAAACCAGCATTTCTTTCAGGTGAACAGAAGAAAGCCATTGTTGATTT | |
| | ACTCTTCAAAACAAATCGAAAAGTAACCGTTAAGCAATTAAAAGAAGATTATTTCAAAA | |
| | AAATAGAATGTTTTGATAGTGTTGAAATTTCAGGAGTTGAAGATAGATTTAATGCTTCA | |
| | TTAGGTACCTACCATGATTTGCTAAAAATTATTAAAGATAAAGATTTTTTGGATAATGA | |
| | AGAAAATGAAGATATCTTAGAGGATATTGTTTTAACATTGACCTTATTTGAAGATAGGG | |
| | AGATGATTGAGGAAAGACTTAAAACATATGCTCACCTCTTTGATGATAAGGTGATGAAA | |
| | CAGCTTAAACGTCGCCGTTATACTGGTTGGGGACGTTTGTCTCGAAAATTGATTAATGG | |
| | TATTAGGGATAAGCAATCTGGCAAAACAATATTAGATTTTTTGAAATCAGATGGTTTTG | |
| | CCAATCGCAATTTTATGCAGCTGATCCATGATGATAGTTTGACATTTAAAGAAGACATT | |
| | CAAAAAGCACAAGTGTCTGGACAAGGCGATAGTTTACATGAACATATTGCAAATTTAGC | |
| | TGGTAGCCCTGCTATTAAAAAAGGTATTTTACAGACTGTAAAAGTTGTTGATGAATTGG | |
| | TCAAAGTAATGGGGCGGCATAAGCCAGAAAATATCGTTATTGAAATGGCACGTGAAAAT | |
| | CAGACAACTCAAAAGGGCCAGAAAAATTCGCGAGAGCGTATGAAACGAATCGAAGAAGG | |
| | TATCAAAGAATTAGGAAGTCAGATTCTTAAAGAGCATCCTGTTGAAAATACTCAATTGC | |
| | AAAATGAAAAGCTCTATCTCTATTATCTCCAAAATGGAAGAGACATGTATGTGGACCAA | |
| | GAATTAGATATTAATCGTTTAAGTGATTATGATGTCGATCACATTGTTCCACAAAGTTT | |
| | CCTTAAAGACGATTCAATAGACAATAAGGTCTTAACGCGTTCTGATAAAAATCGTGGTA | |
| | AATCGGATAACGTTCCAAGTGAAGAAGTAGTCAAAAAGATGAAAAACTATTGGAGACAA | |
| | CTTCTAAACGCCAAGTTAATCACTCAACGTAAGTTTGATAATTTAACGAAAGCTGAACG | |
| | TGGAGGTTTGAGTGAACTTGATAAAGCTGGTTTTATCAAACGCCAATTGGTTGAAACTC | |
| | GCCAAATCACTAAGCATGTGGCACAAATTTTGGATAGTCGCATGAATACTAAATACGAT | |
| | GAAAATGATAAACTTATTCGAGAGGTTAAAGTGATTACCTTAAAATCTAAATTAGTTTC | |
| | TGACTTCCGAAAAGATTTCCAATTCTATAAAGTACGTGAGATTAACAATTACCATCATG | |
| | CCCATGATGCGTATCTAAATGCCGTCGTTGGAACTGCTTTGATTAAGAAATATCCAAAA | |
| | CTTGAATCGGAGTTTGTCTATGGTGATTATAAAGTTTATGATGTTCGTAAAATGATTGC | |
| | TAAGTCTGAGCAAGAAATAGGCAAAGCAACCGCAAAATATTTCTTTTACTCTAATATCA | |
| | TGAACTTCTTCAAAACAGAAATTACACTTGCAAATGGAGAGATTCGCAAACGCCCTCTA | |
| | ATCGAAACTAATGGGGAAACTGGAGAAATTGTCTGGGATAAAGGGCGAGATTTTGCCAC | |
| | AGTGCGCAAAGTATTGTCCATGCCCCAAGTCAATATTGTCAAGAAAACAGAAGTACAGA | |
| | CAGGCGGATTCTCCAAGGAGTCAATTTTACCAAAAAGAAATTCGGACAAGCTTATTGCT | |
| | CGTAAAAAAGACTGGGATCCAAAAAAATATGGTGGTTTTGATAGTCCAACGGTAGCTTA | |
| | TTCAGTCCTAGTGGTTGCTAAGGTGGAAAAAGGGAAATCGAAGAAGTTAAAATCCGTTA | |
| | AAGAGTTACTAGGGATCACAATTATGGAAAGAAGTTCCTTTGAAAAAAATCCGATTGAC | |
| | TTTTTAGAAGCTAAAGGATATAAGGAAGTTAAAAAAGACTTAATCATTAAACTACCTAA | |
| | ATATAGTCTTTTTGAGTTAGAAAACGGTCGTAAACGGATGCTGGCTAGTGCCGGAGAAT | |
| | TACAAAAAGGAAATGAGCTGGCTCTGCCAAGCAAATATGTGAATTTTTTATATTTAGCT | |
| | AGTCATTATGAAAAGTTGAAGGGTAGTCCAGAAGATAACGAACAAAAACAATTGTTTGT | |
| | GGAGCAGCATAAGCATTATTTAGATGAGATTATTGAGCAAATCAGTGAATTTTCTAAGC | |
| | GTGTTATTTTAGCAGATGCCAATTTAGATAAAGTTCTTAGTGCATATAACAAACATAGA | |
| | GACAAACCAATACGTGAACAAGCAGAAAATATTATTCATTTATTTACGTTGACGAATCT | |
| | TGGAGCTCCCGCTGCTTTTAAATATTTTGATACAACAATTGATCGTAAACGATATACGT | |
| | CTACAAAAGAAGTTTTAGATGCCACTCTTATCCATCAATCCATCACTGGTCTTTATGAA | |
| | ACACGCATTGATTTGAGTCAGCTAGGAGGTGACTGA | |
| SpCas9 | MDKKYSIGLDIGTNSVGWAVITDEYKVPSKKFKVLGNTDRHSIKKNLIGALLFDSGETA | SEQ ID NO: |
| Streptococcus | EATRLKRTARRRYTRRKNRICYLQEIFSNEMAKVDDSFFHRLEESFLVEEDKKHERHPI | 324 |
| pyogenes | FGNIVDEVAYHEKYPTIYHLRKKLVDSTDKADLRLIYLALAHMIKFRGHFLIEGDLNPD | |
| M1 GAS wild | NSDVDKLFIQLVQTYNQLFEENPINASGVDAKAILSARLSKSRRLENLIAQLPGEKKNG | |
| type | LFGNLIALSLGLTPNFKSNFDLAEDAKLQLSKDTYDDDLDNLLAQIGDQYADLFLAAKN | |
| Encoded | LSDAILLSDILRVNTEITKAPLSASMIKRYDEHHQDLTLLKALVRQQLPEKYKEIFFDQ | |
| product of | SKNGYAGYIDGGASQEEFYKFIKPILEKMDGTEELLVKLNREDLLRKQRTFDNGSIPHQ | |
| NC_002737.2 | IHLGELHAILRRQEDFYPFLKDNREKIEKILTFRIPYYVGPLARGNSRFAWMTRKSEET | |
| (100% | ITPWNFEEVVDKGASAQSFIERMTNFDKNLPNEKVLPKHSLLYEYFTVYNELTKVKYVT | |
| identical to | EGMRKPAFLSGEQKKAIVDLLFKTNRKVTVKQLKEDYFKKIECFDSVEISGVEDRFNAS | |
| the canonical | LGTYHDLLKIIKDKDFLDNEENEDILEDIVLTLTLFEDREMIEERLKTYAHLFDDKVMK | |
| Q99ZW2 | QLKRRRYTGWGRLSRKLINGIRDKQSGKTILDFLKSDGFANRNFMQLIHDDSLTFKEDI | |
| wild type) | QKAQVSGQGDSLHEHIANLAGSPAIKKGILQTVKVVDELVKVMGRHKPENIVIEMAREN | |
| | QTTQKGQKNSRERMKRIEEGIKELGSQILKEHPVENTQLQNEKLYLYYLQNGRDMYVDQ | |
| | ELDINRLSDYDVDHIVPQSFLKDDSIDNKVLTRSDKNRGKSDNVPSEEVVKKMKNYWRQ | |
| | LLNAKLITQRKFDNLTKAERGGLSELDKAGFIKRQLVETRQITKHVAQILDSRMNTKYD | |
| | ENDKLIREVKVITLKSKLVSDFRKDFQFYKVREINNYHHAHDAYLNAVVGTALIKKYPK | |
| | LESEFVYGDYKVYDVRKMIAKSEQEIGKATAKYFFYSNIMNFFKTEITLANGEIRKRPL | |
| | IETNGETGEIVWDKGRDFATVRKVLSMPQVNIVKKTEVQTGGFSKESILPKRNSDKLIA | |
| | RKKDWDPKKYGGFDSPTVAYSVLVVAKVEKGKSKKLKSVKELLGITIMERSSFEKNPID | |
| | FLEAKGYKEVKKDLIIKLPKYSLFELENGRKRMLASAGELQKGNELALPSKYVNFLYLA | |
| | SHYEKLKGSPEDNEQKQLFVEQHKHYLDEIIEQISEFSKRVILADANLDKVLSAYNKHR | |
| | DKPIREQAENIIHLFTLTNLGAPAAFKYFDTTIDRKRYTSTKEVLDATLIHQSITGLYE | |
| | TRIDLSQLGGD | |

[0197] The adenine base editors described herein may include any of the above SpCas9 sequences, or any variant thereof having at least 80%, at least 85%, at least 90%, at least 95%, or at least 99% sequence identity thereto.

[0198] B. Wild Type Cas9 Orthologs

[0199] In other embodiments, the Cas9 protein can be a wild type Cas9 ortholog from another bacterial species. For example, the following Cas9 orthologs can be used in connection with the adenine base editor constructs described in this disclosure. In addition, any variant Cas9 orthologs having at least 80%, at least 85%, at least 90%, at least 95%, or at least 99% sequence identity to any of the below orthologs may also be used with the disclosed adenine base editors.

| Description | Sequence | |
|---|---|---|
| LfCas 9 | 1 | MKEYHIGLDI GTSSIGWAVT DSQFKLMRIK GKTAIGVRLF EEGKTAAERR TFRTTRRRLK |
| Lactobacillus | 61 | RRKWRLHYLD EIFAPHLQEV DENFLRRLKQ SNIHPEDPTK NQAFIGKLLF PDLLKKNERG |
| fermentum | 121 | YPTLIKMRDE LPVEQRAHYP VMNIYKLREA MINEDRQFDL REVYLAVHHI VKYRGHFLNN |
| wild type | 181 | ASVDKFKVGR IDFDKSFNVL NEAYEELQNG EGSFTIEPSK VEKIGQLLLD TKMRKLDRQK |
| GenBank: | 241 | AVAKLLEVKV ADKEETKRNK QIATAMSKLV LGYKADFATV AMANGNEWKI DLSSETSEDE |
| SNX31424.1 1 | 301 | IEKFREELSD AQNDILTEIT SLFSQIMLNE IVPNGMSISE SMMDRYWTHE RQLAEVKEYL |
| | 361 | ATQPASARKE FDQVYNKYIG QAPKERGFDL EKGLKKILSK KENWKEIDEL LKAGDFLPKQ |
| | 421 | RTSANGVIPH QMHQQELDRI IEKQAKYYPW LATENPATGE RDRHQAKYEL DQLVSFRIPY |
| | 481 | YVGPLVTPEV QKATSGAKFA WAKRKEDGEI TPWNLWDKID RAESAEAFIK RMTVKDTYLL |
| | 541 | NEDVLPANSL LYQKYNVLNE LNNVRVNGRR LSVGIKQDIY TELFKKKKTV KASDVASLVM |
| | 601 | AKTRGVNKPS VEGLSDPKKF NSNLATYLDL KSIVGDKVDD NRYQTDLENI IEWRSVFEDG |
| | 661 | EIFADKLTEV EWLTDEQRSA LVKKRYKGWG RLSKKLLTGI VDENGQRIID LMWNTDQNFK |
| | 721 | EIVDQPVFKE QIDQLNQKAI TNDGMTLRER VESVLDDAYT SPQNKKAIWQ VVRVVEDIVK |
| | 781 | AVGNAPKSIS IEFARNEGNK GEITRSRRTQ LQKLFEDQAH ELVKDTSLTE ELEKAPDLSD |
| | 841 | RYYFYFTQGG KDMYTGDPIN FDEISTKYDI DHILPQSFVK DNSLDNRVLT SRKENNKKSD |
| | 901 | QVPAKLYAAK MKPYWNQLLK QGLITQRKFE NLTKDVDQNI KYRSLGFVKR QLVETRQVIK |
| | 961 | LTANILGSMY QEAGTEIIET RAGLTKQLRE EFDLPKVREV NDYHHAVDAY LTTFAGQYLN |
| | 1021 | RRYPKLRSFF VYGEYMKFKH GSDLKLRNFN FFHELMEGDK SQGKVVDQQT GELITTRDEV |
| | 1081 | AKSFDRLLNM KYMLVSKEVH DRSDQLYGAT IVTAKESGKL TSPIEIKKNR LVDLYGAYTN |
| | 1141 | GTSAFMTIIK FTGNKPKYKV IGIPTTSAAS LKRAGKPGSE SYNQELHRII KSNPKVKKGF |
| | 1201 | EIVVPHVSYG QLIVDGDCKF TLASPTVQHP ATQLVLSKKS LETISSGYKI LKDKPAIANE |
| | 1261 | RLIRVFDEVV GQMNRYFTIF DQRSNRQKVA DARDKFLSLP TESKYEGAKK VQVGKTEVIT |
| | 1321 | NLLMGLHANA TQGDLKVLGL ATFGFFQSTT GLSLSEDTMI VYQSPTGLFE RRICLKDI |
| | | (SEQ ID NO: 345) |
| SaCas 9 | MDKKYSIGLD IGTNSVGWAV ITDEYKVPSK KFKVLGNTDR HSIKKNLIGA LLFDSGETAE | |
| Staphylococcus | ATRLKRTARR RYTRRKNRIC YLQEIFSNEM AKVDDSFFHR LEESFLVEED KKHERHPIFG | |
| aureus wild | NIVDEVAYHE KYPTIYHLRK KLVDSTDKAD LRLIYLALAH MIKFRGHFLI EGDLNPDNSD | |
| type | VDKLFIQLVQ TYNQLFEENP INASGVDAKA ILSARLSKSR RLENLIAQLP GEKKNGLFGN | |
| GenBank: | LIALSLGLTP NFKSNFDLAE DAKLQLSKDT YDDDLDNLLA QIGDQYADLF LAAKNLSDAI | |
| AYD60528.1 | LLSDILRVNT EITKAPLSAS MIKRYDEHHQ DLTLLKALVR QQLPEKYKEI FFDQSKNGYA | |
| | GYIDGGASQE EFYKFIKPIL EKMDGTEELL VKLNREDLLR KQRTFDNGSI PHQIHLGELH | |
| | AILRRQEDFY PFLKDNREKI EKILTFRIPY YVGPLARGNS RFAWMTRKSE ETITPWNFEE | |
| | VVDKGASAQS FIERMTNFDK NLPNEKVLPK HSLLYEYFTV YNELTKVKYV TEGMRKPAFL | |
| | SGEQKKAIVD LLFKTNRKVT VKQLKEDYFK KIECFDSVEI SGVEDRFNAS LGTYHDLLKI | |
| | IKDKDFLDNE ENEDILEDIV LTLTLFEDRE MIEERLKTYA HLFDDKVMKQ LKRRRYTGWG | |
| | RLSRKLINGI RDKQSGKTIL DFLKSDGFAN RNFMQLIHDD SLTFKEDIQK AQVSGQGDSL | |
| | HEHIANLAGS PAIKKGILQT VKVVDELVKV MGRHKPENIV IEMARENQTT QKGQKNSRER | |
| | MKRIEEGIKE LGSQILKEHP VENTQLQNEK LYLYYLQNGR DMYVDQELDI NRLSDYDVDH | |
| | IVPQSFLKDD SIDNKVLTRS DKNRGKSDNV PSEEVVKKMK NYWRQLLNAK LITQRKFDNL | |
| | TKAERGGLSE LDKAGFIKRQ LVETRQITKH VAQILDSRMN TKYDENDKLI REVKVITLKS | |
| | KLVSDFRKDF QFYKVREINN YHHAHDAYLN AVVGTALIKK YPKLESEFVY GDYKVYDVRK | |
| | MIAKSEQEIG KATAKYFFYS NIMNFFKTEI TLANGEIRKR PLIETNGETG EIVWDKGRDF | |
| | ATVRKVLSMP QVNIVKKTEV QTGGFSKESI LPKRNSDKLI ARKKDWDPKK YGGFDSPTVA | |
| | YSVLVVAKVE KGKSKKLKSV KELLGITIME RSSFEKNPID FLEAKGYKEV KKDLIIKLPK | |
| | YSLFELENGR KRMLASAGEL QKGNELALPS KYVNFLYLAS HYEKLKGSPE DNEQKQLFVE | |
| | QHKHYLDEII EQISEFSKRV ILADANLDKV LSAYNKHRDK PIREQAENII HLFTLTNLGA | |
| | PAAFKYFDTT IDRKRYTSTK EVLDATLIHQ SITGLYETRI DLSQLGGD | |
| | (SEQ ID NO: 346) | |
| SaCas 9 | MGKRNYILGLDIGITSVGYGIIDYETRDVIDAGVRLFKEANVENNEGRRSKRGARRLKRRRRHRIQRVKKLL | |
| Staphylococcus | FDYNLLTDHSELSGINPYEARVKGLSQKLSEEEFSAALLHLAKRRGVHNVNEVEEDTGNELSTKEQISRNSK | |
| aureus | ALEEKYVAELQLERLKKDGEVRGSINRFKTSDYVKEAKQLLKVQKAYHQLDQSFIDTYIDLLETRRTYYEGP | |
| | GEGSPFGWKDIKEWYEMLMGHCTYFPEELRSVKYAYNADLYNALNDLNNLVITRDENEKLEYYEKFQIIENV | |
| | FKQKKKPTLKQIAKEILVNEEDIKGYRVTSTGKPEFTNLKVYHDIKDITARKEIIENAELLDQIAKILTIYQ | |
| | SSEDIQEELTNLNSELTQEEIEQISNLKGYTGTHNLSLKAINLILDELWHTNDNQIAIFNRLKLVPKKVDLS | |
| | QQKEIPTTLVDDFILSPVVKRSFIQSIKVINAIIKKYGLPNDIIIELAREKNSKDAQKMINEMQKRNRQTNE | |
| | RIEEIIRTTGKENAKYLIEKIKLHDMQEGKCLYSLEAIPLEDLLNNPFNYEVDHIIPRSVSFDNSFNNKVLV | |
| | KQEENSKKGNRTPFQYLSSSDSKISYETFKKHILNLAKGKGRISKTKKEYLLEERDINRFSVQKDFINRNLV | |
| | DTRYATRGLMNLLRSYFRVNNLDVKVKSINGGFTSFLRRKWKFKKERNKGYKHHAEDALIIANADFIFKEWK | |
| | KLDKAKKVMENQMFEEKQAESMPEIETEQEYKEIFITPHQIKHIKDFKDYKYSHRVDKKPNRKLINDTLYST | |
| | RKDDKGNTLIVNNLNGLYDKDNDKLKKLINKSPEKLLMYHHDPQTYQKLKLIMEQYGDEKNPLYKYYEETGN | |
| | YLTKYSKKDNGPVIKKIKYYGNKLNAHLDITDDYPNSRNKVVKLSLKPYRFDVYLDNGVYKFVTVKNLDVIK | |
| | KENYYEVNSKCYEEAKKLKKISNQAEFIASFYKNDLIKINGELYRVIGVNNDLLNRIEVNMIDITYREYLEN | |
| | MNDKRPPHIIKTIASKTQSIKKYSTDILGNLYEVKSKKHPQIIKK | |
| | (SEQ ID NO: 347) | |
| StCas9 | 1 | MLFNKCIIIS INLDFSNKEK CMTKPYSIGL DIGTNSVGWA VITDNYKVPS KKMKVLGNTS |
| Streptococcus | 61 | KKYIKKNLLG VLLFDSGITA EGRRLKRTAR RRYTRRRNRI LYLQEIFSTE MATLDDAFFQ |
| thermophilus | 121 | RLDDSFLVPD DKRDSKYPIF GNLVEEKVYH DEFPTIYHLR KYLADSTKKA DLRLVYLALA |
| UniProtKB/ | 181 | HMIKYRGHFL IEGEFNSKNN DIQKNFQDFL DTYNAIFESD LSLENSKQLE EIVKDKISKL |
| Swiss-Prot: | 241 | EKKDRILKLF PGEKNSGIFS EFLKLIVGNQ ADFRKCFNLD EKASLHFSKE SYDEDLETLL |
| G3ECR1.2 | 301 | GYIGDDYSDV FLKAKKLYDA ILLSGFLTVT DNETEAPLSS AMIKRYNEHK EDLALLKEYI |
| Wild type | 361 | RNISLKTYNE VFKDDTKNGY AGYIDGKTNQ EDFYVYLKNL LAEFEGADYF LEKIDREDFL |
| | 421 | RKQRTFDNGS IPYQIHLQEM RAILDKQAKF YPFLAKNKER IEKILTFRIP YYVGPLARGN |
| | 481 | SDFAWSIRKR NEKITPWNFE DVIDKESSAE AFINRMTSFD LYLPEEKVLP KHSLLYETFN |
| | 541 | VYNELTKVRF IAESMRDYQF LDSKQKKDIV RLYFKDKRKV TDKDIIEYLH AIYGYDGIEL |
| | 601 | KGIEKQFNSS LSTYHDLLNI INDKEFLDDS SNEAIIEEII HTLTIFEDRE MIKQRLSKFE |
| | 661 | NIFDKSVLKK LSRRHYTGWG KLSAKLINGI RDEKSGNTIL DYLIDDGISN RNFMQLIHDD |
| | 721 | ALSFKKKIQK AQIIGDEDKG NIKEVVKSLP GSPAIKKGIL QSIKIVDELV KVMGGRKPES |
| | 781 | IVVEMARENQ YTNQGKSNSQ QRLKRLEKSL KELGSKILKE NIPAKLSKID NNALQNDRLY |
| | 841 | LYYLQNGKDM YTGDDLDIDR LSNYDIDHII PQAFLKDNSI DNKVLVSSAS NRGKSDDFPS |
| | 901 | LEVVKKRKTF WYQLLKSKLI SQRKFDNLTK AERGGLLPED KAGFIQRQLV ETRQITKHVA |
| | 961 | RLLDEKFNNK KDENNRAVRT VKIITLKSTL VSQFRKDFEL YKVREINDFH HAHDAYLNAV |
| | 1021 | IASALLKKYP KLEPEFVYGD YPKYNSFRER KSATEKVYFY SNIMNIFKKS ISLADGRVIE |
| | 1081 | RPLIEVNEET GESVWNKESD LATVRRVLSY PQVNVVKKVE EQNHGLDRGK PKGLFNANLS |
| | 1141 | SKPKPNSNEN LVGAKEYLDP KKYGGYAGIS NSFAVLVKGT IEKGAKKKIT NVLEFQGISI |
| | 1201 | LDRINYRKDK LNFLLEKGYK DIELIIELPK YSLFELSDGS RRMLASILST NNKRGEIHKG |
| | 1261 | NQIFLSQKFV KLLYHAKRIS NTINENHRKY VENHKKEFEE LFYYILEFNE NYVGAKKNGK |
| | 1321 | LLNSAFQSWQ NHSIDELCSS FIGPTGSERK GLFELTSRGS AADFEFLGVK IPRYRDYTPS |
| | 1381 | SLLKDATLIH QSVTGLYETR IDLAKLGEG |
| | | (SEQ ID NO: 348) |
| LcCas 9 | 1 | MKIKNYNLAL TPSTSAVGHV EVDDDLNILE PVHHQKAIGV AKFGEGETAE ARRLARSARR |
| Lactobacillus | 61 | TTKRRANRIN HYFNEIMKPE IDKVDPLMFD RIKQAGLSPL DERKEFRTVI FDRPNIASYY |
| crispatus | 121 | HNQFPTIWHL QKYLMITDEK ADIRLIYWAL HSLLKHRGHF FNTTPMSQFK PGKLNLKDDM |
| NCBI Reference | 181 | LALDDYNDLE GLSFAVANSP EIEKVIKDRS MHKKEKIAEL KKLIVNDVPD KDLAKRNNKI |
| Sequence: | 241 | ITQIVNAIMG NSFHLNFIFD MDLDKLTSKA WSFKLDDPEL DTKFDAISGS MTDNQIGIFE |
| WP_133478044. | 301 | TLQKIYSAIS LLDILNGSSN VVDAKNALYD KHKRDLNLYF KFLNTLPDEI AKTLKAGYTL |
| 1 | 361 | YIGNRKKDLL AARKLLKVNV AKNFSQDDFY KLINKELKSI DKQGLQTRFS EKVGELVAQN |
| Wild type | 421 | NFLPVQRSSD NVFIPYQLNA ITFNKILENQ GKYYDFLVKP NPAKKDRKNA PYELSQLMQF |
| | 481 | TIPYYVGPLV TPEEQVKSGI PKTSRFAWMV RKDNGAITPW NFYDKVDIEA TADKFIKRSI |
| | 541 | AKDSYLLSEL VLPKHSLLYE KYEVFNELSN VSLDGKKLSG GVKQILFNEV FKKTNKVNTS |
| | 601 | RILKALAKHN IPGSKITGLS NPEEFTSSLQ TYNAWKKYFP NQIDNFAYQQ DLEKMIEWST |
| | 661 | VFEDHKILAK KLDEIEWLDD DQKKFVANTR LRGWGRLSKR LLTGLKDNYG KSIMQRLETT |
| | 721 | KANFQQIVYK PEFREQIDKI SQAAAKNQSL EDILANSYTS PSNRKAIRKT MSVVDEYIKL |
| | 781 | NHGKEPDKIF LMFQRSEQEK GKQTEARSKQ LNRILSQLKA DKSANKLFSK QLADEFSNAI |
| | 841 | KKSKYKLNDK QYFYFQQLGR DALTGEVIDY DELYKYTVLH IIPRSKLTDD SQNNKVLTKY |
| | 901 | KIVDGSVALK FGNSYSDALG MPIKAFWTEL NRLKLIPKGK LLNLTTDFST LNKYQRDGYI |
| | 961 | ARQLVETQQI VKLLATIMQS RFKHTKIIEV RNSQVANIRY QFDYFRIKNL NEYYRGFDAY |
| | 1021 | LAAVVGTYLY KVYPKARRLF VYGQYLKPKK TNQENQDMHL DSEKKSQGFN FLWNLLYGKQ |
| | 1081 | DQIFVNGTDV IAFNRKDLIT KMNTVYNYKS QKISLAIDYH NGAMFKATLE PRNDRDTAKT |
| | 1141 | RKLIPKKKDY DTDIYGGYTS NVDGYMLLAE IIKRDGNKQY GFYGVPSRLV SELDTLKKTR |
| | 1201 | YTEYEEKLKE IIKPELGVDL KKIKKIKILK NKVPFNQVII DKGSKFFITS TSYRWNYRQL |
| | 1261 | ILSAESQQTL MDLVVDPDFS NHKARKDARK NADERLIKVY EEILYQVKNY MPMFVELHRC |
| | 1321 | YEKLVDAQKT FKSLKISDKA MVLNQILILL HSNATSPVLE KLGYHTRFTL GKKHNLISEN |
| | 1381 | AVLVTQSITG LKENHVSIKQ ML |
| | | (SEQ ID NO: 349) |
| PdCas 9 | 1 | MTNEKYSIGL DIGTSSIGFA VVNDNNRVIR VKGKNAIGVR LFDEGKAAAD RRSFRTTRRS |
| Pedicoccus | 61 | FRTTRRRLSR RRWRLKLLRE IFDAYITPVD EAFFIRLKES NLSPKDSKKQ YSGDILFNDR |
| damnosus | 121 | SDKDFYEKYP TIYHLRNALM TEHRKFDVRE IYLAIHHIMK FRGHFLNATP ANNFKVGRLN |
| NCBI Reference | 181 | LEEKFEELND IYQRVFPDES IEFRTDNLEQ IKEVLLDNKR SRADRQRTLV SDIYQSSEDK |
| Sequence: | 241 | DIEKRNKAVA TEILKASLGN KAKLNVITNV EVDKEAAKEW SITFDSESID DDLAKIEGQM |
| WP_062913273. | 301 | TDDGHEIIEV LRSLYSGITL SAIVPENHTL SQSMVAKYDL HKDHLKLFKK LINGMTDTKK |
| 1 | 361 | AKNLRAAYDG YIDGVKGKVL PQEDFYKQVQ VNLDDSAEAN EIQTYIDQDI FMPKQRTKAN |
| Wild type | 421 | GSIPHQLQQQ ELDQIIENQK AYYPWLAELN PNPDKKRQQL AKYKLDELVT FRVPYYVGPM |
| | 481 | ITAKDQKNQS GAEFAWMIRK EPGNITPWNF DQKVDRMATA NQFIKRMTTT DTYLLGEDVL |
| | 541 | PAQSLLYQKF EVLNELNKIR IDHKPISIEQ KQQIFNDLFK QFKNVTIKHL QDYLVSQGQY |
| | 601 | SKRPLIEGLA DEKRFNSSLS TYSDLCGIFG AKLVEENDRQ EDLEKIIEWS TIFEDKKIYR |
| | 661 | AKLNDLTWLT DDQKEKLATK RYQGWGRLSR KLLVGLKNSE HRNIMDILWI TNENFMQIQA |
| | 721 | EPDFAKLVTD ANKGMLEKTD SQDVINDLYT SPQNKKAIRQ ILLVVHDIQN AMHGQAPAKI |
| | 781 | HVEFARGEER NPRRSVQRQR QVEAAYEKVS NELVSAKVRQ EFKEAINNKR DFKDRLFLYF |
| | 841 | MQGGIDIYTG KQLNIDQLSS YQIDHILPQA FVKDDSLTNR VLTNENQVKA DSVPIDIFGK |
| | 901 | KMLSVWGRMK DQGLISKGKY RNLTMNPENI SAHTENGFIN RQLVETRQVI KLAVNILADE |
| | 961 | YGDSTQIISV KADLSHQMRE DFELLKNRDV NDYHHAFDAY LAAFIGNYLL KRYPKLESYF |
| | 1021 | VYGDFKKFTQ KETKMRRFNF IYDLKHCDQV VNKETGEILW TKDEDIKYIR HLFAYKKILV |
| | 1081 | SHEVREKRGA LYNQTIYKAK DDKGSGQESK KLIRIKDDKE TKIYGGYSGK SLAYMTIVQI |
| | 1141 | TKKNKVSYRV IGIPTLALAR LNKLENDSTE NNGELYKIIK PQFTHYKVDK KNGEIIETTD |
| | 1201 | DFKIVVSKVR FQQLIDDAGQ FFMLASDTYK NNAQQLVISN NALKAINNTN ITDCPRDDLE |
| | 1261 | RLDNLRLDSA FDEIVKKMDK YFSAYDANNF REKIRNSNLI FYQLPVEDQW ENNKITELGK |
| | 1321 | RTVLTRILQG LHANATTTDM SIFKIKTPFG QLRQRSGISL SENAQLIYQS PTGLFERRVQ |
| | 1381 | LNKIK |
| | | (SEQ ID NO: 350) |
| FnCas 9 | 1 | MKKQKFSDYY LGFDIGTNSV GWCVTDLDYN VLRFNKKDMW GSRLFEEAKT AAERRVQRNS |
| Fusobacterium | 61 | RRRLKRRKWR LNLLEEIFSN EILKIDSNFF RRLKESSLWL EDKSSKEKFT LFNDDNYKDY |
| nucleatum | 121 | DFYKQYPTIF HLRNELIKNP EKKDIRLVYL AIHSIFKSRG HFLFEGQNLK EIKNFETLYN |
| NCBI Reference | 181 | NLIAFLEDNG INKIIDKNNI EKLEKIVCDS KKGLKDKEKE FKEIFNSDKQ LVAIFKLSVG |
| Sequence: | 241 | SSVSLNDLFD TDEYKKGEVE KEKISFREQI YEDDKPIYYS ILGEKIELLD IAKTFYDFMV |
| WP_060798984. | 301 | LNNILADSQY ISEAKVKLYE EHKKDLKNLK YIIRKYNKGN YDKLFKDKNE NNYSAYIGLN |
| 1 | 361 | KEKSKKEVIE KSRLKIDDLI KNIKGYLPKV EEIEEKDKAI FNKILNKIEL KTILPKQRIS |
| | 421 | DNGTLPYQIH EAELEKILEN QSKYYDFLNY EENGIITKDK LLMTFKFRIP YYVGPLNSYH |
| | 481 | KDKGGNSWIV RKEEGKILPW NFEQKVDIEK SAEEFIKRMT NKCTYLNGED VIPKDTFLYS |
| | 541 | EYVILNELNK VQVNDEFLNE ENKRKIIDEL FKENKKVSEK KFKEYLLVKQ IVDGTIELKG |
| | 601 | VKDSFNSNYI SYIRFKDIFG EKLNLDIYKE ISEKSILWKC LYGDDKKIFE KKIKNEYGDI |
| | 661 | LTKDEIKKIN TFKFNNWGRL SEKLLTGIEF INLETGECYS SVMDALRRTN YNLMELLSSK |
| | 721 | FTLQESINNE NKEMNEASYR DLIEESYVSP SLKRAIFQTL KIYEEIRKII GRVPKKVFIE |
| | 781 | MARGGDESMK NKKIPARQEQ LKKLYDSCGN DIANFSIDIK EMKNSLISYD NNSLRQKKLY |
| | 841 | LYYLQFGKCM YTGREIDLDR LLQNNDTYDI DHIYPRSKVI KDDSFDNLVL VLKNENAEKS |
| | 901 | NEYPVKKEIQ EKMKSFWRFL KEKNFISDEK YKRLTGKDDF ELRGFMARQL VNVRQTTKEV |
| | 961 | GKILQQIEPE IKIVYSKAEI ASSFREMFDF IKVRELNDTH HAKDAYLNIV AGNVYNTKFT |
| | 1021 | EKPYRYLQEI KENYDVKKIY NYDIKNAWDK ENSLEIVKKN MEKNTVNITR FIKEKKGQLF |
| | 1081 | DLNPIKKGET SNEIISIKPK VYNGKDDKLN EKYGYYKSLN PAYFLYVEHK EKNKRIKSFE |
| | 1141 | RVNLVDVNNI KDEKSLVKYL IENKKLVEPR VIKKVYKRQV ILINDYPYSI VTLDSNKLMD |
| | 1201 | FENLKPLFLE NKYEKILKNV IKFLEDNQGK SEENYKFIYL KKKDRYEKNE TLESVKDRYN |
| | 1261 | LEFNEMYDKF LEKLDSKDYK NYMNNKKYQE LLDVKEKFIK LNLFDKAFTL KSFLDLFNRK |
| | 1321 | TMADFSKVGL TKYLGKIQKI SSNVLSKNEL YLLEESVTGL FVKKIKL |
| | | (SEQ ID NO: 351) |
| EcCas 9 | 61 | RRKQRIQILQ ELLGEEVLKT DPGFFHRMKE SRYVVEDKRT LDGKQVELPY ALFVDKDYTD |
| Enterococcus | 121 | KEYYKQFPTI NHLIVYLMTT SDTPDIRLVY LALHYYMKNR GNFLHSGDIN NVKDINDILE |
| cecorum | 181 | QLDNVLETFL DGWNLKLKSY VEDIKNIYNR DLGRGERKKA FVNTLGAKTK |
| NCBI Reference | | AEKAFCSLIS |
| Sequence: | 241 | GGSTNLAELF DDSSLKEIET PKIEFASSSL EDKIDGIQEA LEDRFAVIEA |
| WP_047338501. | | AKRLYDWKTL |
| 1 | 301 | TDILGDSSSL AEARVNSYQM HHEQLLELKS LVKEYLDRKV FQEVFVSLNV |
| Wild type | | ANNYPAYIGH |
| | 361 | TKINGKKKEL EVKRTKRNDF YSYVKKQVIE PIKKKVSDEA VLTKLSEIES |
| | | LIEVDKYLPL |
| | 421 | QVNSDNGVIP YQVKLNELTR IFDNLENRIP VLRENRDKII KTFKFRIPYY |
| | | VGSLNGVVKN |
| | 481 | GKCTNWMVRK EEGKIYPWNF EDKVDLEASA EQFIRRMTNK CTYLVNEDVL |
| | | PKYSLLYSKY |
| | 541 | LVLSELNNLR IDGRPLDVKI KQDIYENVFK KNRKVTLKKI KKYLLKEGII |
| | | TDDDELSGLA |
| | 601 | DDVKSSLTAY RDFKEKLGHL DLSEAQMENI ILNITLFGDD KKLLKKRLAA |
| | | LYPFIDDKSL |
| | 661 | NRIATLNYRD WGRLSERFLS GITSVDQETG ELRTIIQCMY ETQANLMQLL |
| | | AEPYHFVEAI |
| | 721 | EKENPKVDLE SISYRIVNDL YVSPAVKRQI WQTLLVIKDI KQVMKHDPER |
| | | IFIEMAREKQ |
| | 781 | ESKKTKSRKQ VLSEVYKKAK EYEHLFEKLN SLTEEQLRSK KIYLYFTQLG |
| | | KCMYSGEPID |
| | 841 | FENLVSANSN YDIDHIYPQS KTIDDSFNNI VLVKKSLNAY KSNHYPIDKN |
| | | IRDNEKVKTL |
| | 901 | WNTLVSKGLI TKEKYERLIR STPFSDEELA GFIARQLVET RQSTKAVAEI |
| | | LSNWFPESEI |
| | 961 | VYSKAKNVSN FRQDFEILKV RELNDCHHAH DAYLNIVVGN AYHTKFTNSP |
| | | YRFIKNKANQ |
| | 1021 | EYNLRKLLQK VNKIESNGVV AWVGQSENNP GTIATVKKVI RRNTVLISRM |
| | | VKEVDGQLFD |
| | 1081 | LTLMKKGKGQ VPIKSSDERL TDISKYGGYN KATGAYFTFV KSKKRGKVVR |
| | | SFEYVPLHLS |
| | 1141 | KQFENNNELL KEYIEKDRGL TDVEILIPKV LINSLFRYNG SLVRITGRGD |
| | | TRLLLVHEQP |
| | 1201 | LYVSNSFVQQ LKSVSSYKLK KSENDNAKLT KTATEKLSNI DELYDGLLRK |
| | | LDLPIYSYWF |
| | 1261 | SSIKEYLVES RTKYIKLSIE EKALVIFEIL HLFQSDAQVP NLKILGLSTK |
| | | PSRIRIQKNL |
| | 1321 | KDTDKMSIIH QSPSGIFEHE IELTSL (SEQ ID NO: 352) |
| AhCas 9 | 1 | MQNGFLGITV SSEQVGWAVT NPKYELERAS RKDLWGVRLF DKAETAEDRR MFRTNRRLNQ |
| Anaerostipes | 61 | RKKNRIHYLR DIFHEEVNQK DPNFFQQLDE SNFCEDDRTV EFNFDTNLYK NQFPTVYHLR |
| hadrus | 121 | KYLMETKDKP DIRLVYLAFS KFMKNRGHFL YKGNLGEVMD FENSMKGFCE SLEKFNIDFP |
| NCBI Reference | 181 | TLSDEQVKEV RDILCDHKIA KTVKKKNIIT ITKVKSKTAK AWIGLFCGCS VPVKVLFQDI |
| Sequence: | 241 | DEEIVTDPEK ISFEDASYDD YIANIEKGVG IYYEAIVSAK MLFDWSILNE ILGDHQLLSD |
| WP_044924278. | 301 | AMIAEYNKHH DDLKRLQKII KGTGSRELYQ DIFINDVSGN YVCYVGHAKT MSSADQKQFY |
| 1 | 361 | TFLKNRLKNV NGISSEDAEW IDTEIKNGTL LPKQTKRDNS VIPHQLQLRE FELILDNMQE |
| Wild type | 421 | MYPFLKENRE KLLKIFNFVI PYYVGPLKGV VRKGESTNWM VPKKDGVIHP WNFDEMVDKE |
| | 481 | ASAECFISRM TGNCSYLFNE KVLPKNSLLY ETFEVLNELN PLKINGEPIS VELKQRIYEQ |
| | 541 | LFLTGKKVTK KSLTKYLIKN GYDKDIELSG IDNEFHSNLK SHIDFEDYDN LSDEEVEQII |
| | 601 | LRITVFEDKQ LLKDYLNREF VKLSEDERKQ ICSLSYKGWG NLSEMLLNGI TVTDSNGVEV |
| | 661 | SVMDMLWNTN LNLMQILSKK YGYKAEIEHY NKEHEKTIYN REDLMDYLNI PPAQRRKVNQ |
| | 721 | LITIVKSLKK TYGVPNKIFF KISREHQDDP KRTSSRKEQL KYLYKSLKSE DEKHLMKELD |
| | 781 | ELNDHELSND KVYLYFLQKG RCIYSGKKLN LSRLRKSNYQ NDIDYIYPLS AVNDRSMNNK |
| | 841 | VLTGIQENRA DKYTYFPVDS EIQKKMKGFW MELVLQGFMT KEKYFRLSRE NDFSKSELVS |
| | 901 | FIEREISDNQ QSGRMIASVL QYYFPESKIV FVKEKLISSF KRDFHLISSY GHNHLQAAKD |
| | 961 | AYITIVVGNV YHTKFTMDPA IYFKNHKRKD YDLNRLFLEN ISRDGQIAWE SGPYGSIQTV |
| | 1021 | RKEYAQNHIA VTKRVVEVKG GLFKQMPLKK GHGEYPLKTN DPRFGNIAQY GGYTNVTGSY |
| | 1081 | FVLVESMEKG KKRISLEYVP VYLHERLEDD PGHKLLKEYL VDHRKLNHPK ILLAKVRKNS |
| | 1141 | LLKIDGFYYR LNGRSGNALI LTNAVELIMD DWQTKTANKI SGYMKRRAID KKARVYQNEF |
| | 1201 | HIQELEQLYD FYLDKLKNGV YKNRKNNQAE LIHNEKEQFM ELKTEDQCVL LTEIKKLFVC |
| | 1261 | SPMQADLTLI GGSKHTGMIA MSSNVTKADF AVIAEDPLGL RNKVIYSHKG EK |
| | | (SEQ ID NO: 353) |
| KvCas 9 | 1 | MSQNNNKIYN IGLDIGDASV GWAVVDEHYN LLKRHGKHMW GSRLFTQANT AVERRSSRST |
| Kandleria | 61 | RRRYNKRRER IRLLREIMED MVLDVDPTFF IRLANVSFLD QEDKKDYLKE NYHSNYNLFI |
| vitulina | 121 | DKDFNDKTYY DKYPTIYHLR KHLCESKEKE DPRLIYLALH HIVKYRGNFL YEGQKFSMDV |
| NCBI Reference | 181 | SNIEDKMIDV LRQFNEINLF EYVEDRKKID EVLNVLKEPL SKKHKAEKAF ALFDTTKDNK |
| Sequence: | 241 | AAYKELCAAL AGNKFNVTKM LKEAELHDED EKDISFKFSD ATFDDAFVEK QPLLGDCVEF |
| WP_031589969. | 301 | IDLLHDIYSW VELQNILGSA HTSEPSISAA MIQRYEDHKN DLKLLKDVIR KYLPKKYFEV |
| 1 | 361 | FRDEKSKKNN YCNYINHPSK TPVDEFYKYI KKLIEKIDDP DVKTILNKIE LESFMLKQNS |
| Wild type | 421 | RTNGAVPYQM QLDELNKILE NQSVYYSDLK DNEDKIRSIL TFRIPYYFGP LNITKDRQFD |
| | 481 | WIIKKEGKEN ERILPWNANE IVDVDKTADE FIKRMRNFCT YFPDEPVMAK NSLTVSKYEV |
| | 541 | LNEINKLRIN DHLIKRDMKD KMLHTLFMDH KSISANAMKK WLVKNQYFSN TDDIKIEGFQ |
| | 601 | KENACSTSLT PWIDFTKIFG KINESNYDFI EKIIYDVTVF EDKKILRRRL KKEYDLDEEK |
| | 661 | IKKILKLKYS GWSRLSKKLL SGIKTKYKDS TRTPETVLEV MERTNMNLMQ VINDEKLGFK |
| | 721 | KTIDDANSTS VSGKFSYAEV QELAGSPAIK RGIWQALLIV DEIKKIMKHE PAHVYIEFAR |
| | 781 | NEDEKERKDS FVNQMLKLYK DYDFEDETEK EANKHLKGED AKSKIRSERL KLYYTQMGKC |
| | 841 | MYTGKSLDID RLDTYQVDHI VPQSLLKDDS IDNKVLVLSS ENQRKLDDLV IPSSIRNKMY |
| | 901 | GFWEKLFNNK IISPKKFYSL IKTEFNEKDQ ERFINRQIVE TRQITKHVAQ IIDNHYENTK |
| | 961 | VVTVRADLSH QFRERYHIYK NRDINDFHHA HDAYIATILG TYIGHRFESL DAKYIYGEYK |
| | 1021 | RIFRNQKNKG KEMKKNNDGF ILNSMRNIYA DKDTGEIVWD PNYIDRIKKC FYYKDCFVTK |
| | 1081 | KLEENNGTFF NVTVLPNDTN SDKDNTLATV PVNKYRSNVN KYGGFSGVNS FIVAIKGKKK |
| | 1141 | KGKKVIEVNK LTGIPLMYKN ADEEIKINYL KQAEDLEEVQ IGKEILKNQL IEKDGGLYYI |
| | 1201 | VAPTEIINAK QLILNESQTK LVCEIYKAMK YKNYDNLDSE KIIDLYRLLI NKMELYYPEY |
| | 1261 | RKQLVKKFED RYEQLKVISI EEKCNIIKQI LATLHCNSSI GKIMYSDFKI STTIGRLNGR |
| | 1321 | TISLDDISFI AESPTGMYSK KYKL (SEQ ID NO: 354) |
| EfCas 9 | 1 | MRLFEEGHTA EDRRLKRTAR RRISRRRNRL RYLQAFFEEA MTDLDENFFA RLQESFLVPE |
| Enterococcus | 61 | DKKWHRHPIF AKLEDEVAYH ETYPTIYHLR KKLADSSEQA DLRLIYLALA HIVKYRGHFL |
| faecalis | 121 | IEGKLSTENT SVKDQFQQFM VIYNQTFVNG ESRLVSAPLP ESVLIEEELT EKASRTKKSE |
| NCBI | 181 | KVLQQFPQEK ANGLFGQFLK LMVGNKADFK KVFGLEEEAK ITYASESYEE DLEGILAKVG |
| Reference | 241 | DEYSDVFLAA KNVYDAVELS TILADSDKKS HAKLSSSMIV RFTEHQEDLK KFKRFIRENC |
| Sequence: | 301 | PDEYDNLFKN EQKDGYAGYI AHAGKVSQLK FYQYVKKIIQ DIAGAEYFLE KIAQENFLRK |
| WP_016631044. | 361 | QRTFDNGVIP HQIHLAELQA IIHRQAAYYP FLKENQEKIE QLVTFRIPYY VGPLSKGDAS |
| 1 | 421 | TFAWLKRQSE EPIRPWNLQE TVDLDQSATA FIERMTNFDT YLPSEKVLPK HSLLYEKFMV |
| Wild type | 481 | FNELTKISYT DDRGIKANFS GKEKEKIFDY LFKTRRKVKK KDIIQFYRNE YNTEIVTLSG |
| | 541 | LEEDQFNASF STYQDLLKCG LTRAELDHPD NAEKLEDIIK ILTIFEDRQR IRTQLSTFKG |
| | 601 | QFSAEVLKKL ERKHYTGWGR LSKKLINGIY DKESGKTILD YLVKDDGVSK HYNRNFMQLI |
| | 661 | NDSQLSFKNA IQKAQSSEHE ETLSETVNEL AGSPAIKKGI YQSLKIVDEL VAIMGYAPKR |
| | 721 | IVVEMARENQ TTSTGKRRSI QRLKIVEKAM AEIGSNLLKE QPTTNEQLRD TRLFLYYMQN |
| | 781 | GKDMYTGDEL SLHRLSHYDI DHIIPQSFMK DDSLDNLVLV GSTENRGKSD DVPSKEVVKD |
| | 841 | MKAYWEKLYA AGLISQRKFQ RLTKGEQGGL TLEDKAHFIQ RQLVETRQIT KNVAGILDQR |
| | 901 | YNAKSKEKKV QIITLKASLT SQFRSIFGLY KVREVNDYHH GQDAYLNCVV ATTLLKVYPN |
| | 961 | LAPEFVYGEY PKFQTFKENK ATAKAIIYTN LLRFFTEDEP RFTKDGEILW SNSYLKTIKK |
| | 1021 | ELNYHQMNIV KKVEVQKGGF SKESIKPKGP SNKLIPVKNG LDPQKYGGFD SPVVAYTVLF |
| | 1081 | THEKGKKPLI KQEILGITIM EKTRFEQNPI LFLEEKGFLR PRVLMKLPKY TLYEFPEGRR |
| | 1141 | RLLASAKEAQ KGNQMVLPEH LLTLLYHAKQ CLLPNQSESL AYVEQHQPEF QEILERVVDF |
| | 1201 | AEVHTLAKSK VQQIVKLFEA NQTADVKEIA ASFIQLMQFN AMGAPSTFKF FQKDIERARY |
| | 1261 | TSIKEIFDAT IIYQSPTGLY ETRRKVVD (SEQ ID NO: 355) |

| | |
|---|---|
| Staphylococcus | KRNYILGLDIGITSVGYGIIDYETRDVIDAGVRLFKEANVENNEGRRSKRGARRLKRRRRHRIQRVKKLLFD |
| aureus Cas9 | YNLLTDHSELSGINPYEARVKGLSQKLSEEEFSAALLHLAKRRGVHNVNEVEEDTGNELSTKEQISRNSKAL |
| | EEKYVAELQLERLKKDGEVRGSINRFKTSDYVKEAKQLLKVQKAYHQLDQSFIDTYIDLLETRRTYYEGPGE |
| | GSPFGWKDIKEWYEMLMGHCTYFPEELRSVKYAYNADLYNALNDLNNLVITRDENEKLEYYEKFQIIENVFK |
| | QKKKPTLKQIAKEILVNEEDIKGYRVTSTGKPEFTNLKVYHDIKDITARKEIIENAELLDQIAKILTIYQSS |
| | EDIQEELTNLNSELTQEEIEQISNLKGYTGTHNLSLKAINLILDELWHTNDNQIAIFNRLKLVPKKVDLSQQ |
| | KEIPTTLVDDFILSPVVKRSFIQSIKVINAIIKKYGLPNDIIIELAREKNSKDAQKMINEMQKRNRQTNERI |
| | EEIIRTTGKENAKYLIEKIKLHDMQEGKCLYSLEAIPLEDLLNNPFNYEVDHIIPRSVSFDNSFNNKVLVKQ |
| | EENSKKGNRTPFQYLSSSDSKISYETFKKHILNLAKGKGRISKTKKEYLLEERDINRFSVQKDFINRNLVDT |
| | RYATRGLMNLLRSYFRVNNLDVKVKSINGGFTSFLRRKWKFKKERNKGYKHHAEDALIIANADFIFKEWKKL |
| | DKAKKVMENQMFEEKQAESMPEIETEQEYKEIFITPHQIKHIKDFKDYKYSHRVDKKPNRELINDTLYSTRK |
| | DDKGNTLIVNNLNGLYDKDNDKLKKLINKSPEKLLMYHHDPQTYQKLKLIMEQYGDEKNPLYKYYEETGNYL |
| | TKYSKKDNGPVIKKIKYYGNKLNAHLDITDDYPNSRNKVVKLSLKPYRFDVYLDNGVYKFVTVKNLDVIKKE |
| | NYYEVNSKCYEEAKKLKKISNQAEFIASFYNNDLIKINGELYRVIGVNNDLLNRIEVNMIDITYREYLENMN |
| | DKRPPRIIKTIASKTQSIKKYSTDILGNLYEVKSKKHPQIIKKG |
| | (SEQ ID NO: 356) |
| Geobacillus | MKYKIGLDIGITSIGWAVINLDIPRIEDLGVRIFDRAENPKTGESLALPRRLARSARRRLRRRKHRLERIRR |
| thermodenitri- | LFVREGILTKEELNKLFEKKHEIDVWQLRVEALDRKLNNDELARILLHLAKRRGFRSNRKSERTNKENSTML |
| ficans Cas9 | KHIEENQSILSSYRTVAEMVVKDPKFSLHKRNKEDNYTNTVARDDLEREIKLIFAKQREYGNIVCTEAFEHE |
| | YISIWASQRPFASKDDIEKKVGFCTFEPKEKRAPKATYTFQSFTVWEHINKLRLVSPGGIRALTDDERRLIY |
| | KQAFHKNKITFHDVRTLLNLPDDTRFKGLLYDRNTTLKENEKVRFLELGAYHKIRKAIDSVYGKGAAKSFRP |
| | IDFDTFGYALTMFKDDTDIRSYLRNEYEQNGKRMENLADKVYDEELIEELLNLSFSKFGHLSLKALRNILPY |
| | MEQGEVYSTACERAGYTFTGPKKKQKTVLLPNIPPIANPVVMRALTQARKVVNAIIKKYGSPVSIHIELARE |
| | LSQSFDERRKMQKEQEGNRKKNETAIRQLVEYGLTLNPTGLDIVKFKLWSEQNGKCAYSLQPIEIERLLEPG |
| | YTEVDHVIPYSRSLDDSYTNKVLVLTKENREKGNRTPAEYLGLGSERWQQFETFVLTNKQFSKKKRDRLLRL |
| | HYDENEENEFKNRNLNDTRYISRFLANFIREHLKFADSDDKQKVYTVNGRITAHLRSRWNFNKNREESNLHH |
| | AVDAAIVACTTPSDIARVTAFYQRREQNKELSKKTDPQFPQPWPHFADELQARLSKNPKESIKALNLGNYDN |
| | EKLESLQPVFVSRMPKRSITGAAHQETLRRYIGIDERSGKIQTVVKKKLSEIQLDKTGHFPMYGKESDPRTY |
| | EAIRQRLLEHNNDPKKAFQEPLYKPKKNGELGPIIRTIKIIDTTNQVIPLNDGKTVAYNSNIVRVDVFEKDG |
| | KYYCVPIYTIDMMKGILPNKAIEPNKPYSEWKEMTEDYTFRFSLYPNDLIRIEFPREKTIKTAVGEEIKIKD |
| | LFAYYQTIDSSNGGLSLVSHDNNFSLRSIGSRTLKRFEKYQVDVLGNIYKVRGEKRVGVASSSHSKAGETIR |
| | PL |
| | (SEQ ID NO: 357) |
| ScCas 9 | MEKKYSIGLDIGTNSVGWAVITDDYKVPSKKFKVLGNTNRKSIKKNLMGALLFDSGETAEATRLKRTARRRY |
| S. canis | TRRKNRIRYLQEIFANEMAKLDDSFFQRLEESFLVEEDKKNERHPIFGNLADEVAYHRNYPTIYHLRKKLAD |
| 1375 AA | SPEKADLRLIYLALAHIIKFRGHFLIEGKLNAENSDVAKLFYQLIQTYNQLFEESPLDEIEVDAKGILSARL |
| 159.2 kDa | SKSKRLEKLIAVFPNEKKNGLFGNIIALALGLTPNFKSNFDLTEDAKLQLSKDTYDDDLDELLGQIGDQYAD |
| | LFSAAKNLSDAILLSDILRSNSEVTKAPLSASMVKRYDEHHQDLALLKTLVRQQFPEKYAEIFKDDTKNGYA |
| | GYVGIGIKHRKRTTKLATQEEFYKFIKPILEKMDGAEELLAKLNRDDLLRKQRTFDNGSIPHQIHLKELHAI |
| | LRRQEEFYPFLKENREKIEKILTFRIPYYVGPLARGNSRFAWLTRKSEEAITPWNFEEVVDKGASAQSFIER |
| | MTNFDEQLPNKKVLPKHSLLYEYFTVYNELTKVKYVTERMRKPEFLSGEQKKAIVDLLFKTNRKVTVKQLKE |
| | DYFKKIECFDSVEIIGVEDRFNASLGTYHDLLKIIKDKDFLDNEENEDILEDIVLTLTLFEDREMIEERLKT |
| | YAHLFDDKVMKQLKRRHYTGWGRLSRKMINGIRDKQSGKTILDFLKSDGFSNRNFMQLIHDDSLTFKEEIEK |
| | AQVSGQGDSLHEQIADLAGSPAIKKGILQTVKIVDELVKVMGHKPENIVIEMARENQTTTKGLQQSRERKKR |
| | IEEGIKELESQILKENPVENTQLQNEKLYLYYLQNGRDMYVDQELDINRLSDYDVDHIVPQSFIKDDSIDNK |
| | VLTRSVENRGKSDNVPSEEVVKKMKNYWRQLLNAKLITQRKFDNLTKAERGGLSEADKAGFIKRQLVETRQI |
| | TKHVARILDSRMNTKRDKNDKPIREVKVITLKSKLVSDFRKDFQLYKVRDINNYHHAHDAYLNAVVGTALIK |
| | KYPKLESEFVYGDYKVYDVRKMIAKSEQEIGKATAKRFFYSNIMNFFKTEVKLANGEIRKRPLIETNGETGE |
| | VVWNKEKDFATVRKVLAMPQVNIVKKTEVQTGGFSKESILSKRESAKLIPRKKGWDTRKYGGFGSPTVAYSI |
| | LVVAKVEKGKAKKLKSVKVLVGITIMEKGSYEKDPIGFLEAKGYKDIKKELIFKLPKYSLFELENGRRRMLA |
| | SATELQKANELVLPQHLVRLLYYTQNISATTGSNNLGYIEQHREEFKEIFEKIIDFSEKYILKNKVNSNLKS |
| | SFDEQFAVSDSILLSNSFVSLLKYTSFGASGGFTFLDLDVKQGRLRYQTVTEVLDATLIYQSITGLYETRTD |
| | LSQLGGD (SEQ ID NO: 358) |

[0200] The adenine base editors described herein may include any of the above Cas9 ortholog sequences, or any variants thereof having at least 80%, at least 85%, at least 90%, at least 95%, or at least 99% sequence identity thereto.

[0201] The napDNAbp may include any suitable homologs and/or orthologs or naturally occurring enzymes, such as Cas9. Cas9 homologs and/or orthologs have been described in various species, including, but not limited to, S. pyogenes and S. thermophilus. Preferably, the Cas moiety is configured (e.g, mutagenized, recombinantly engineered, or otherwise obtained from nature) as a nickase, i.e., capable of cleaving only a single strand of the target doubpdditional suitable Cas9 nucleases and sequences will be apparent to those of skill in the art based on this disclosure, and such Cas9 nucleases and sequences include Cas9 sequences from the organisms and loci disclosed in Chylinski, Rhun, and Charpentier, “The tracrRNA and Cas9 families of type II CRISPR-Cas immunity systems” (2013) RNA Biology 10:5, 726-737; the entire contents of which are incorporated herein by reference. In some embodiments, a Cas9 nuclease has an inactive (e.g., an inactivated) DNA cleavage domain, that is, the Cas9 is a nickase. In some embodiments, the Cas9 protein comprises an amino acid sequence that is at least 80% identical to the amino acid sequence of a Cas9 protein as provided by any one of the variants of Table 3. In some embodiments, the Cas9 protein comprises an amino acid sequence that is at least 85%, at least 90%, at least 92%, at least 95%, at least 96%, at least 97%, at least 98%, at least 99%, or at least 99.5% identical to the amino acid sequence of a Cas9 protein as provided by any one of the Cas9 orthologs in the above tables.

[0202] C. Dead napDNAbp Variants

[0203] In some embodiments, the disclosed adenine base editors may comprise a catalytically inactive, or “dead,” napDNAbp domain. Exemplary catalytically inactive domains in the disclosed adenine base editors are dead S. pyogenes Cas9 (dSpCas9), dead S. aureus Cas9 (dSaCas9) and dead Lachnospiraceae bacterium Cas12a (dLbCas12a).

[0204] In certain embodiments, the adenine base editors described herein may include a dead Cas9, e.g., dead SpCas9, which has no nuclease activity due to one or more mutations that inactivate both nuclease domains of SpCas9, namely the RuvC domain (which cleaves the non-protospacer DNA strand) and HNH domain (which cleaves the protospacer DNA strand). The nuclease inactivation may be due to one or mutations that result in one or more substitutions and/or deletions in the amino acid sequence of the encoded protein, or any variants thereof having at least 80%, at least 85%, at least 90%, at least 95%, or at least 99% sequence identity thereto.

[0205] In certain embodiments, the adenine base editors described herein may include a dead Cas9, e.g., dead SpCas9, which has no nuclease activity due to one or more mutations that inactivate both nuclease domains of SaCas9, namely the RuvC domain (which cleaves the non-protospacer DNA strand) and HNH domain (which cleaves the protospacer DNA strand). The D10A and N580A mutations in the wild-type S. aureus Cas9 amino acid sequence may be used to form a dSaCas9. Accordingly, in some embodiments, the napDNAbp domain of the base editors provided herein comprises a dSaCas9 that has D10A and N580A mutations relative to the wild-type SaCas9 sequence (SEQ ID NO: 377).

[0206] As used herein, the term “dCas9” refers to a nuclease-inactive Cas9 or nuclease-dead Cas9, or a functional fragment thereof, and embraces any naturally occurring dCas9 from any organism, any naturally-occurring dCas9 equivalent or functional fragment thereof, any dCas9 homolog, ortholog, or paralog from any organism, and any mutant or variant of a dCas9, naturally-occurring or engineered. The term dCas9 is not meant to be particularly limiting and may be referred to as a “dCas9 or equivalent.” Exemplary dCas9 proteins and method for making dCas9 proteins are further described herein and/or are described in the art and are incorporated herein by reference.

[0207] In other embodiments, dCas9 corresponds to, or comprises in part or in whole, a Cas9 amino acid sequence having one or more mutations that inactivate the Cas9 nuclease activity. In other embodiments, Cas9 variants having mutations other than D10A and H840A are provided which may result in the full or partial inactivate of the endogneous Cas9 nuclease activity (e.g., nCas9 or dCas9, respectively). Such mutations, by way of example, include other amino acid substitutions at D10 and H820, or other substitutions within the nuclease domains of Cas9 (e.g., substitutions in the HNH nuclease subdomain and/or the RuvC1 subdomain) with reference to a wild type sequence such as Cas9 from Streptococcus pyogenes (NCBI Reference Sequence: NC_017053.1). In some embodiments, variants or homologues of Cas9 (e.g., variants of Cas9 from Streptococcus pyogenes (NCBI Reference Sequence: NC_017053.1)) are provided which are at least about 70% identical, at least about 80% identical, at least about 90% identical, at least about 95% identical, at least about 98% identical, at least about 99% identical, at least about 99.5% identical, or at least about 99.9% identical to NCBI Reference Sequence: NC_017053.1. In some embodiments, variants of dCas9 (e.g., variants of NCBI Reference Sequence: NC_017053.1) are provided having amino acid sequences which are shorter, or longer than NC_017053.1 by about 5 amino acids, by about 10 amino acids, by about 15 amino acids, by about 20 amino acids, by about 25 amino acids, by about 30 amino acids, by about 40 amino acids, by about 50 amino acids, by about 75 amino acids, by about 100 amino acids or more.

[0208] In some embodiments, the napDNAbp domain of any of the disclosed base editors comprises a dead S. pyogenes Cas9 (dSpCas9). In some embodiments, the napDNAbp domain of any of the disclosed based editors is comprises at least 80%, at least 85%, at least 90%, at least 95%, or at least 99% sequence identity to SEQ ID NO: 360. In some embodiments, the napDNAbp domain of any of the disclosed base editors comprises the amino acid sequence of SEQ ID NO: 360.

[0209] In some embodiments, the napDNAbp domain of any of the disclosed base editors comprises a dead Lachnospiraceae bacterium Cas12a (dLbCas12a). In some embodiments, the napDNAbp domain of any of the disclosed based editors is comprises at least 80%, at least 85%, at least 90%, at least 95%, or at least 99% sequence identity to SEQ ID NO: 447. In some embodiments, the napDNAbp domain of any of the disclosed base editors comprises the amino acid sequence of SEQ ID NO: 447.

[0210] In one embodiment, the dead Cas9 may be based on the canonical SpCas9 sequence of Q99ZW2 and may have the following sequence, which comprises a D10A and an H810A substitutions (underlined and bolded), or a variant of SEQ ID NO: 359 having at least 80%, at least 85%, at least 90%, at least 95%, or at least 99% sequence identity thereto:

| Description | Sequence | SEQ ID NO: |
|---|---|---|
| dead Cas9 or | MDKKYSIGLXIGTNSVGWAVITDEYKVPSKKFKVLGNTDRHSIKKNLIGALLFDSGETA | SEQ ID NO: |
| dCas 9 | EATRLKRTARRRYTRRKNRICYLQEIFSNEMAKVDDSFFHRLEESFLVEEDKKHERHPI | 359 |
| Streptococcus | FGNIVDEVAYHEKYPTIYHLRKKLVDSTDKADLRLIYLALAHMIKFRGHFLIEGDLNPD | |
| pyogenes | NSDVDKLFIQLVQTYNQLFEENPINASGVDAKAILSARLSKSRRLENLIAQLPGEKKNG | |
| Q99ZW2 Cas9 | LFGNLIALSLGLTPNFKSNFDLAEDAKLQLSKDTYDDDLDNLLAQIGDQYADLFLAAKN | |
| with D10X and | LSDAILLSDILRVNTEITKAPLSASMIKRYDEHHQDLTLLKALVRQQLPEKYKEIFFDQ | |
| H810X | SKNGYAGYIDGGASQEEFYKFIKPILEKMDGTEELLVKLNREDLLRKQRTFDNGSIPHQ | |
| Where “X” is | IHLGELHAILRRQEDFYPFLKDNREKIEKILTFRIPYYVGPLARGNSRFAWMTRKSEET | |
| any amino | ITPWNFEEVVDKGASAQSFIERMTNFDKNLPNEKVLPKHSLLYEYFTVYNELTKVKYVT | |
| acid | EGMRKPAFLSGEQKKAIVDLLFKTNRKVTVKQLKEDYFKKIECFDSVEISGVEDRFNAS | |
| | LGTYHDLLKIIKDKDFLDNEENEDILEDIVLTLTLFEDREMIEERLKTYAHLFDDKVMK | |
| | QLKRRRYTGWGRLSRKLINGIRDKQSGKTILDFLKSDGFANRNFMQLIHDDSLTFKEDI | |
| | QKAQVSGQGDSLHEHIANLAGSPAIKKGILQTVKVVDELVKVMGRHKPENIVIEMAREN | |
| | QTTQKGQKNSRERMKRIEEGIKELGSQILKEHPVENTQLQNEKLYLYYLQNGRDMYVDQ | |
| | ELDINRLSDYDVDXIVPQSFLKDDSIDNKVLTRSDKNRGKSDNVPSEEVVKKMKNYWRQ | |
| | LLNAKLITQRKFDNLTKAERGGLSELDKAGFIKRQLVETRQITKHVAQILDSRMNTKYD | |
| | ENDKLIREVKVITLKSKLVSDFRKDFQFYKVREINNYHHAHDAYLNAVVGTALIKKYPK | |
| | LESEFVYGDYKVYDVRKMIAKSEQEIGKATAKYFFYSNIMNFFKTEITLANGEIRKRPL | |
| | IETNGETGEIVWDKGRDFATVRKVLSMPQVNIVKKTEVQTGGFSKESILPKRNSDKLIA | |
| | RKKDWDPKKYGGFDSPTVAYSVLVVAKVEKGKSKKLKSVKELLGITIMERSSFEKNPID | |
| | FLEAKGYKEVKKDLIIKLPKYSLFELENGRKRMLASAGELQKGNELALPSKYVNFLYLA | |
| | SHYEKLKGSPEDNEQKQLFVEQHKHYLDEIIEQISEFSKRVILADANLDKVLSAYNKHR | |
| | DKPIREQAENIIHLFTLTNLGAPAAFKYFDTTIDRKRYTSTKEVLDATLIHQSITGLYE | |
| | TRIDLSQLGGD | |
| dead Cas9 or | MDKKYSIGLAIGTNSVGWAVITDEYKVPSKKFKVLGNTDRHSIKKNLIGALLFDSGETA | SEQ ID NO: |
| dCas 9 | EATRLKRTARRRYTRRKNRICYLQEIFSNEMAKVDDSFFHRLEESFLVEEDKKHERHPI | 360 |
| Streptococcus | FGNIVDEVAYHEKYPTIYHLRKKLVDSTDKADLRLIYLALAHMIKFRGHFLIEGDLNPD | |
| pyogenes | NSDVDKLFIQLVQTYNQLFEENPINASGVDAKAILSARLSKSRRLENLIAQLPGEKKNG | |
| Q99ZW2 Cas9 | LFGNLIALSLGLTPNFKSNFDLAEDAKLQLSKDTYDDDLDNLLAQIGDQYADLFLAAKN | |
| with D10A and | LSDAILLSDILRVNTEITKAPLSASMIKRYDEHHQDLTLLKALVRQQLPEKYKEIFFDQ | |
| H810A | SKNGYAGYIDGGASQEEFYKFIKPILEKMDGTEELLVKLNREDLLRKQRTFDNGSIPHQ | |
| | IHLGELHAILRRQEDFYPFLKDNREKIEKILTFRIPYYVGPLARGNSRFAWMTRKSEET | |
| | ITPWNFEEVVDKGASAQSFIERMTNFDKNLPNEKVLPKHSLLYEYFTVYNELTKVKYVT | |
| | EGMRKPAFLSGEQKKAIVDLLFKTNRKVTVKQLKEDYFKKIECFDSVEISGVEDRFNAS | |
| | LGTYHDLLKIIKDKDFLDNEENEDILEDIVLTLTLFEDREMIEERLKTYAHLFDDKVMK | |
| | QLKRRRYTGWGRLSRKLINGIRDKQSGKTILDFLKSDGFANRNFMQLIHDDSLTFKEDI | |
| | QKAQVSGQGDSLHEHIANLAGSPAIKKGILQTVKVVDELVKVMGRHKPENIVIEMAREN | |
| | QTTQKGQKNSRERMKRIEEGIKELGSQILKEHPVENTQLQNEKLYLYYLQNGRDMYVDQ | |
| | ELDINRLSDYDVDAIVPQSFLKDDSIDNKVLTRSDKNRGKSDNVPSEEVVKKMKNYWRQ | |
| | LLNAKLITQRKFDNLTKAERGGLSELDKAGFIKRQLVETRQITKHVAQILDSRMNTKYD | |
| | ENDKLIREVKVITLKSKLVSDFRKDFQFYKVREINNYHHAHDAYLNAVVGTALIKKYPK | |
| | LESEFVYGDYKVYDVRKMIAKSEQEIGKATAKYFFYSNIMNFFKTEITLANGEIRKRPL | |
| | IETNGETGEIVWDKGRDFATVRKVLSMPQVNIVKKTEVQTGGFSKESILPKRNSDKLIA | |
| | RKKDWDPKKYGGFDSPTVAYSVLVVAKVEKGKSKKLKSVKELLGITIMERSSFEKNPID | |
| | FLEAKGYKEVKKDLIIKLPKYSLFELENGRKRMLASAGELQKGNELALPSKYVNFLYLA | |
| | SHYEKLKGSPEDNEQKQLFVEQHKHYLDEIIEQISEFSKRVILADANLDKVLSAYNKHR | |
| | DKPIREQAENIIHLFTLTNLGAPAAFKYFDTTIDRKRYTSTKEVLDATLIHQSITGLYE | |
| | TRIDLSQLGGD | |
| dead | MSKLEKFTNCYSLSKTLRFKAIPVGKTQENIDNKRLLVEDEKRAEDYKGVKKLLDRYYL | SEQ ID NO: |
| Lachnospiraceae | SFINDVLHSIKLKNLNNYISLFRKKTRTEKENKELENLEINLRKEIAKAFKGNEGYKSL | 447 |
| bacterium | FKKDIIETILPEFLDDKDEIALVNSFNGFTTAFTGFFDNRENMFSEEAKSTSIAFRCIN | |
| Cas12a | ENLTRYISNMDIFEKVDAIFDKHEVQEIKEKILNSDYDVEDFFEGEFFNFVLTQEGIDV | |
| | YNAIIGGFVTESGEKIKGLNEYINLYNQKTKQKLPKFKPLYKQVLSDRESLSFYGEGYT | |
| | SDEEVLEVFRNTLNKNSEIFSSIKKLEKLFKNFDEYSSAGIFVKNGPAISTISKDIFGE | |
| | WNVIRDKWNAEYDDIHLKKKAVVTEKYEDDRRKSFKKIGSFSLEQLQEYADADLSVVEK | |
| | LKEIIIQKVDEIYKVYGSSEKLFDADFVLEKSLKKNDAVVAIMKDLLDSVKSFENYIKA | |
| | FFGEGKETNRDESFYGDFVLAYDILLKVDHIYDAIRNYVTQKPYSKDKFKLYFQNPQFM | |
| | GGWDKDKETDYRATILRYGSKYYLAIMDKKYAKCLQKIDKDDVNGNYEKINYKLLPGPN | |
| | KMLPKVFFSKKWMAYYNPSEDIQKIYKNGTFKKGDMFNLNDCHKLIDFFKDSISRYPKW | |
| | SNAYDFNFSETEKYKDIAGFYREVEEQGYKVSFESASKKEVDKLVEEGKLYMFQIYNKD | |
| | FSDKSHGTPNLHTMYFKLLFDENNHGQIRLSGGAELFMRRASLKKEELVVHPANSPIAN | |
| | KNPDNPKKTTTLSYDVYKDKRFSEDQYELHIPIAINKCPKNIFKINTEVRVLLKHDDNP | |
| | YVIGIARGERNLLYIVVVDGKGNIVEQYSLNEIINNFNGIRIKTDYHSLLDKKEKERFE | |
| | ARQNWTSIENIKELKAGYISQVVHKICELVEKYDAVIALEDLNSGFKNSRVKVEKQVYQ | |
| | KFEKMLIDKLNYMVDKKSNPCATGGALKGYQITNKFESFKSMSTQNGFIFYIPAWLTSK | |
| | IDPSTGFVNLLKTKYTSIADSKKEISSFDRIMYVPEEDLFEFALDYKNFSRTDADYIKK | |
| | WKLYSYGNRIRIFRNPKKNNVFDWEEVCLTSAYKELFNKYGINYQQGDIRALLCEQSDK | |
| | AFYSSFMALMSLMLQMRNSITGRTDVDFLISPVKNSDGIFYDSRNYEAQENAILPKNAD | |
| | ANGAYNIARKVLWAIGQFKKAEDEKLDKVKIAISNKEWLEYAQTSVK | |

[0211] D. napDNAbp Nickase Variants

[0212] In some embodiments, the disclosed adenine base editors may comprise a napDNAbp domain that comprises a nickase. In some embodiments, the adenine base editors described herein comprise a Cas9 nickase. The term “Cas9 nickase” of “nCas9” refers to a variant of Cas9 which is capable of introducing a single-strand break in a double strand DNA molecule target. In some embodiments, the Cas9 nickase comprises only a single functioning nuclease domain. The wild type Cas9 (e.g., the canonical SpCas9) comprises two separate nuclease domains, namely, the RuvC domain (which cleaves the non-protospacer DNA strand) and HNH domain (which cleaves the protospacer DNA strand). In one embodiment, the Cas9 nickase comprises a mutation in the RuvC domain which inactivates the RuvC nuclease activity. For example, mutations in aspartate (D) 10, histidine (H) 983, aspartate (D) 986, or glutamate (E) 762, have been reported as loss-of-function mutations of the RuvC nuclease domain and the creation of a functional Cas9 nickase (e.g., Nishimasu et al., “Crystal structure of Cas9 in complex with guide RNA and target DNA,” Cell 156(5), 935-949, which is incorporated herein by reference). Thus, nickase mutations in the RuvC domain could include D10X, H983X, D986X, or E762X, wherein X is any amino acid other than the wild type amino acid. In certain embodiments, the nickase could be D10A, of H983A, or D986A, or E762A, or a combination thereof.

[0213] In some embodiments, the napDNAbp domain of any of the disclosed base editors comprises an S. pyogenes Cas9 nickase (SpCas9n). In some embodiments, the napDNAbp domain of any of the disclosed based editors is comprises at least 80%, at least 85%, at least 90%, at least 95%, or at least 99% sequence identity to SEQ ID NO: 365 or 370. In some embodiments, the napDNAbp domain of any of the disclosed base editors comprises the amino acid sequence of SEQ ID NO: 365. In some embodiments, the napDNAbp domain of any of the disclosed base editors comprises the amino acid sequence of SEQ ID NO: 370.

[0214] In some embodiments, the napDNAbp domain of any of the disclosed base editors comprises an S. aureus Cas9 nickase (SaCas9n). In some embodiments, the napDNAbp domain of any of the disclosed based editors is comprises at least 80%, at least 85%, at least 90%, at least 95%, or at least 99% sequence identity to SEQ ID NO: 438. In some embodiments, the napDNAbp domain of any of the disclosed base editors comprises the amino acid sequence of SEQ ID NO: 438.

[0215] In various embodiments, the Cas9 nickase can having a mutation in the RuvC nuclease domain and have one of the following amino acid sequences, or a variant thereof having an amino acid sequence that has at least 80%, at least 85%, at least 90%, at least 95%, or at least 99% sequence identity thereto.

| Description | Sequence | SEQ ID NO: |
|---|---|---|
| Cas9 nickase | MDKKYSIGLXIGTNSVGWAVITDEYKVPSKKFKVLGNTDRHSIKKNLIGALLFDSGETA | SEQ ID NO: |
| Streptococcus | EATRLKRTARRRYTRRKNRICYLQEIFSNEMAKVDDSFFHRLEESFLVEEDKKHERHPI | 361 |
| pyogenes | FGNIVDEVAYHEKYPTIYHLRKKLVDSTDKADLRLIYLALAHMIKFRGHFLIEGDLNPD | |
| Q99ZW2 Cas9 | NSDVDKLFIQLVQTYNQLFEENPINASGVDAKAILSARLSKSRRLENLIAQLPGEKKNG | |
| with D10X, | LFGNLIALSLGLTPNFKSNFDLAEDAKLQLSKDTYDDDLDNLLAQIGDQYADLFLAAKN | |
| wherein X is | LSDAILLSDILRVNTEITKAPLSASMIKRYDEHHQDLTLLKALVRQQLPEKYKEIFFDQ | |
| any alternate | SKNGYAGYIDGGASQEEFYKFIKPILEKMDGTEELLVKLNREDLLRKQRTFDNGSIPHQ | |
| amino acid | IHLGELHAILRRQEDFYPFLKDNREKIEKILTFRIPYYVGPLARGNSRFAWMTRKSEET | |
| | ITPWNFEEVVDKGASAQSFIERMTNFDKNLPNEKVLPKHSLLYEYFTVYNELTKVKYVT | |
| | EGMRKPAFLSGEQKKAIVDLLFKTNRKVTVKQLKEDYFKKIECFDSVEISGVEDRFNAS | |
| | LGTYHDLLKIIKDKDFLDNEENEDILEDIVLTLTLFEDREMIEERLKTYAHLFDDKVMK | |
| | QLKRRRYTGWGRLSRKLINGIRDKQSGKTILDFLKSDGFANRNFMQLIHDDSLTFKEDI | |
| | QKAQVSGQGDSLHEHIANLAGSPAIKKGILQTVKVVDELVKVMGRHKPENIVIEMAREN | |
| | QTTQKGQKNSRERMKRIEEGIKELGSQILKEHPVENTQLQNEKLYLYYLQNGRDMYVDQ | |
| | ELDINRLSDYDVDHIVPQSFLKDDSIDNKVLTRSDKNRGKSDNVPSEEVVKKMKNYWRQ | |
| | LLNAKLITQRKFDNLTKAERGGLSELDKAGFIKRQLVETRQITKHVAQILDSRMNTKYD | |
| | ENDKLIREVKVITLKSKLVSDFRKDFQFYKVREINNYHHAHDAYLNAVVGTALIKKYPK | |
| | LESEFVYGDYKVYDVRKMIAKSEQEIGKATAKYFFYSNIMNFFKTEITLANGEIRKRPL | |
| | IETNGETGEIVWDKGRDFATVRKVLSMPQVNIVKKTEVQTGGFSKESILPKRNSDKLIA | |
| | RKKDWDPKKYGGFDSPTVAYSVLVVAKVEKGKSKKLKSVKELLGITIMERSSFEKNPID | |
| | FLEAKGYKEVKKDLIIKLPKYSLFELENGRKRMLASAGELQKGNELALPSKYVNFLYLA | |
| | SHYEKLKGSPEDNEQKQLFVEQHKHYLDEIIEQISEFSKRVILADANLDKVLSAYNKHR | |
| | DKPIREQAENIIHLFTLTNLGAPAAFKYFDTTIDRKRYTSTKEVLDATLIHQSITGLYE | |
| | TRIDLSQLGGD | |
| Cas9 nickase | MDKKYSIGLDIGTNSVGWAVITDEYKVPSKKFKVLGNTDRHSIKKNLIGALLFDSGETA | SEQ ID NO: |
| Streptococcus | EATRLKRTARRRYTRRKNRICYLQEIFSNEMAKVDDSFFHRLEESFLVEEDKKHERHPI | 362 |
| pyogenes | FGNIVDEVAYHEKYPTIYHLRKKLVDSTDKADLRLIYLALAHMIKFRGHFLIEGDLNPD | |
| Q99ZW2 Cas9 | NSDVDKLFIQLVQTYNQLFEENPINASGVDAKAILSARLSKSRRLENLIAQLPGEKKNG | |
| with E762X, | LFGNLIALSLGLTPNFKSNFDLAEDAKLQLSKDTYDDDLDNLLAQIGDQYADLFLAAKN | |
| wherein X is | LSDAILLSDILRVNTEITKAPLSASMIKRYDEHHQDLTLLKALVRQQLPEKYKEIFFDQ | |
| any alternate | SKNGYAGYIDGGASQEEFYKFIKPILEKMDGTEELLVKLNREDLLRKQRTFDNGSIPHQ | |
| amino acid | IHLGELHAILRRQEDFYPFLKDNREKIEKILTFRIPYYVGPLARGNSRFAWMTRKSEET | |
| | ITPWNFEEVVDKGASAQSFIERMTNFDKNLPNEKVLPKHSLLYEYFTVYNELTKVKYVT | |
| | EGMRKPAFLSGEQKKAIVDLLFKTNRKVTVKQLKEDYFKKIECFDSVEISGVEDRFNAS | |
| | LGTYHDLLKIIKDKDFLDNEENEDILEDIVLTLTLFEDREMIEERLKTYAHLFDDKVMK | |
| | QLKRRRYTGWGRLSRKLINGIRDKQSGKTILDFLKSDGFANRNFMQLIHDDSLTFKEDI | |
| | QKAQVSGQGDSLHEHIANLAGSPAIKKGILQTVKVVDELVKVMGRHKPENIVIXMAREN | |
| | QTTQKGQKNSRERMKRIEEGIKELGSQILKEHPVENTQLQNEKLYLYYLQNGRDMYVDQ | |
| | ELDINRLSDYDVDHIVPQSFLKDDSIDNKVLTRSDKNRGKSDNVPSEEVVKKMKNYWRQ | |
| | LLNAKLITQRKFDNLTKAERGGLSELDKAGFIKRQLVETRQITKHVAQILDSRMNTKYD | |
| | ENDKLIREVKVITLKSKLVSDFRKDFQFYKVREINNYHHAHDAYLNAVVGTALIKKYPK | |
| | LESEFVYGDYKVYDVRKMIAKSEQEIGKATAKYFFYSNIMNFFKTEITLANGEIRKRPL | |
| | IETNGETGEIVWDKGRDFATVRKVLSMPQVNIVKKTEVQTGGFSKESILPKRNSDKLIA | |
| | RKKDWDPKKYGGFDSPTVAYSVLVVAKVEKGKSKKLKSVKELLGITIMERSSFEKNPID | |
| | FLEAKGYKEVKKDLIIKLPKYSLFELENGRKRMLASAGELQKGNELALPSKYVNFLYLA | |
| | SHYEKLKGSPEDNEQKQLFVEQHKHYLDEIIEQISEFSKRVILADANLDKVLSAYNKHR | |
| | DKPIREQAENIIHLFTLTNLGAPAAFKYFDTTIDRKRYTSTKEVLDATLIHQSITGLYE | |
| | TRIDLSQLGGD | |
| Cas9 nickase | MDKKYSIGLDIGTNSVGWAVITDEYKVPSKKFKVLGNTDRHSIKKNLIGALLFDSGETA | SEQ ID NO: |
| Streptococcus | EATRLKRTARRRYTRRKNRICYLQEIFSNEMAKVDDSFFHRLEESFLVEEDKKHERHPI | 363 |
| pyogenes | FGNIVDEVAYHEKYPTIYHLRKKLVDSTDKADLRLIYLALAHMIKFRGHFLIEGDLNPD | |
| Q99ZW2 Cas9 | NSDVDKLFIQLVQTYNQLFEENPINASGVDAKAILSARLSKSRRLENLIAQLPGEKKNG | |
| with H983X, | LFGNLIALSLGLTPNFKSNFDLAEDAKLQLSKDTYDDDLDNLLAQIGDQYADLFLAAKN | |
| wherein X is | LSDAILLSDILRVNTEITKAPLSASMIKRYDEHHQDLTLLKALVRQQLPEKYKEIFFDQ | |
| any alternate | SKNGYAGYIDGGASQEEFYKFIKPILEKMDGTEELLVKLNREDLLRKQRTFDNGSIPHQ | |
| amino acid | IHLGELHAILRRQEDFYPFLKDNREKIEKILTFRIPYYVGPLARGNSRFAWMTRKSEET | |
| | ITPWNFEEVVDKGASAQSFIERMTNFDKNLPNEKVLPKHSLLYEYFTVYNELTKVKYVT | |
| | EGMRKPAFLSGEQKKAIVDLLFKTNRKVTVKQLKEDYFKKIECFDSVEISGVEDRFNAS | |
| | LGTYHDLLKIIKDKDFLDNEENEDILEDIVLTLTLFEDREMIEERLKTYAHLFDDKVMK | |
| | QLKRRRYTGWGRLSRKLINGIRDKQSGKTILDFLKSDGFANRNFMQLIHDDSLTFKEDI | |
| | QKAQVSGQGDSLHEHIANLAGSPAIKKGILQTVKVVDELVKVMGRHKPENIVIEMAREN | |
| | QTTQKGQKNSRERMKRIEEGIKELGSQILKEHPVENTQLQNEKLYLYYLQNGRDMYVDQ | |
| | ELDINRLSDYDVDHIVPQSFLKDDSIDNKVLTRSDKNRGKSDNVPSEEVVKKMKNYWRQ | |
| | LLNAKLITQRKFDNLTKAERGGLSELDKAGFIKRQLVETRQITKHVAQILDSRMNTKYD | |
| | ENDKLIREVKVITLKSKLVSDFRKDFQFYKVREINNYHXAHDAYLNAVVGTALIKKYPK | |
| | LESEFVYGDYKVYDVRKMIAKSEQEIGKATAKYFFYSNIMNFFKTEITLANGEIRKRPL | |
| | IETNGETGEIVWDKGRDFATVRKVLSMPQVNIVKKTEVQTGGFSKESILPKRNSDKLIA | |
| | RKKDWDPKKYGGFDSPTVAYSVLVVAKVEKGKSKKLKSVKELLGITIMERSSFEKNPID | |
| | FLEAKGYKEVKKDLIIKLPKYSLFELENGRKRMLASAGELQKGNELALPSKYVNFLYLA | |
| | SHYEKLKGSPEDNEQKQLFVEQHKHYLDEIIEQISEFSKRVILADANLDKVLSAYNKHR | |
| | DKPIREQAENIIHLFTLTNLGAPAAFKYFDTTIDRKRYTSTKEVLDATLIHQSITGLYE | |
| | TRIDLSQLGGD | |
| Cas9 nickase | MDKKYSIGLDIGTNSVGWAVITDEYKVPSKKFKVLGNTDRHSIKKNLIGALLFDSGETA | SEQ ID NO: |
| Streptococcus | EATRLKRTARRRYTRRKNRICYLQEIFSNEMAKVDDSFFHRLEESFLVEEDKKHERHPI | 364 |
| pyogenes | FGNIVDEVAYHEKYPTIYHLRKKLVDSTDKADLRLIYLALAHMIKFRGHFLIEGDLNPD | |
| Q99ZW2 Cas9 | NSDVDKLFIQLVQTYNQLFEENPINASGVDAKAILSARLSKSRRLENLIAQLPGEKKNG | |
| with D986X, | LFGNLIALSLGLTPNFKSNFDLAEDAKLQLSKDTYDDDLDNLLAQIGDQYADLFLAAKN | |
| wherein X is | LSDAILLSDILRVNTEITKAPLSASMIKRYDEHHQDLTLLKALVRQQLPEKYKEIFFDQ | |
| any alternate | SKNGYAGYIDGGASQEEFYKFIKPILEKMDGTEELLVKLNREDLLRKQRTFDNGSIPHQ | |
| amino acid | IHLGELHAILRRQEDFYPFLKDNREKIEKILTFRIPYYVGPLARGNSRFAWMTRKSEET | |
| | ITPWNFEEVVDKGASAQSFIERMTNFDKNLPNEKVLPKHSLLYEYFTVYNELTKVKYVT | |
| | EGMRKPAFLSGEQKKAIVDLLFKTNRKVTVKQLKEDYFKKIECFDSVEISGVEDRFNAS | |
| | LGTYHDLLKIIKDKDFLDNEENEDILEDIVLTLTLFEDREMIEERLKTYAHLFDDKVMK | |
| | QLKRRRYTGWGRLSRKLINGIRDKQSGKTILDFLKSDGFANRNFMQLIHDDSLTFKEDI | |
| | QKAQVSGQGDSLHEHIANLAGSPAIKKGILQTVKVVDELVKVMGRHKPENIVIEMAREN | |
| | QTTQKGQKNSRERMKRIEEGIKELGSQILKEHPVENTQLQNEKLYLYYLQNGRDMYVDQ | |
| | ELDINRLSDYDVDHIVPQSFLKDDSIDNKVLTRSDKNRGKSDNVPSEEVVKKMKNYWRQ | |
| | LLNAKLITQRKFDNLTKAERGGLSELDKAGFIKRQLVETRQITKHVAQILDSRMNTKYD | |
| | ENDKLIREVKVITLKSKLVSDFRKDFQFYKVREINNYHHAHXAYLNAVVGTALIKKYPK | |
| | LESEFVYGDYKVYDVRKMIAKSEQEIGKATAKYFFYSNIMNFFKTEITLANGEIRKRPL | |
| | IETNGETGEIVWDKGRDFATVRKVLSMPQVNIVKKTEVQTGGFSKESILPKRNSDKLIA | |
| | RKKDWDPKKYGGFDSPTVAYSVLVVAKVEKGKSKKLKSVKELLGITIMERSSFEKNPID | |
| | FLEAKGYKEVKKDLIIKLPKYSLFELENGRKRMLASAGELQKGNELALPSKYVNFLYLA | |
| | SHYEKLKGSPEDNEQKQLFVEQHKHYLDEIIEQISEFSKRVILADANLDKVLSAYNKHR | |
| | DKPIREQAENIIHLFTLTNLGAPAAFKYFDTTIDRKRYTSTKEVLDATLIHQSITGLYE | |
| | TRIDLSQLGGD | |
| Cas9 nickase | MDKKYSIGLAIGTNSVGWAVITDEYKVPSKKFKVLGNTDRHSIKKNLIGALLFDSGETA | SEQ ID NO: |
| Streptococcus | EATRLKRTARRRYTRRKNRICYLQEIFSNEMAKVDDSFFHRLEESFLVEEDKKHERHPI | 365 |
| pyogenes | FGNIVDEVAYHEKYPTIYHLRKKLVDSTDKADLRLIYLALAHMIKFRGHFLIEGDLNPD | |
| Q99ZW2 Cas9 | NSDVDKLFIQLVQTYNQLFEENPINASGVDAKAILSARLSKSRRLENLIAQLPGEKKNG | |
| with D10A | LFGNLIALSLGLTPNFKSNFDLAEDAKLQLSKDTYDDDLDNLLAQIGDQYADLFLAAKN | |
| | LSDAILLSDILRVNTEITKAPLSASMIKRYDEHHQDLTLLKALVRQQLPEKYKEIFFDQ | |
| | SKNGYAGYIDGGASQEEFYKFIKPILEKMDGTEELLVKLNREDLLRKQRTFDNGSIPHQ | |
| | IHLGELHAILRRQEDFYPFLKDNREKIEKILTFRIPYYVGPLARGNSRFAWMTRKSEET | |
| | ITPWNFEEVVDKGASAQSFIERMTNFDKNLPNEKVLPKHSLLYEYFTVYNELTKVKYVT | |
| | EGMRKPAFLSGEQKKAIVDLLFKTNRKVTVKQLKEDYFKKIECFDSVEISGVEDRFNAS | |
| | LGTYHDLLKIIKDKDFLDNEENEDILEDIVLTLTLFEDREMIEERLKTYAHLFDDKVMK | |
| | QLKRRRYTGWGRLSRKLINGIRDKQSGKTILDFLKSDGFANRNFMQLIHDDSLTFKEDI | |
| | QKAQVSGQGDSLHEHIANLAGSPAIKKGILQTVKVVDELVKVMGRHKPENIVIEMAREN | |
| | QTTQKGQKNSRERMKRIEEGIKELGSQILKEHPVENTQLQNEKLYLYYLQNGRDMYVDQ | |
| | ELDINRLSDYDVDHIVPQSFLKDDSIDNKVLTRSDKNRGKSDNVPSEEVVKKMKNYWRQ | |
| | LLNAKLITQRKFDNLTKAERGGLSELDKAGFIKRQLVETRQITKHVAQILDSRMNTKYD | |
| | ENDKLIREVKVITLKSKLVSDFRKDFQFYKVREINNYHHAHDAYLNAVVGTALIKKYPK | |
| | LESEFVYGDYKVYDVRKMIAKSEQEIGKATAKYFFYSNIMNFFKTEITLANGEIRKRPL | |
| | IETNGETGEIVWDKGRDFATVRKVLSMPQVNIVKKTEVQTGGFSKESILPKRNSDKLIA | |
| | RKKDWDPKKYGGFDSPTVAYSVLVVAKVEKGKSKKLKSVKELLGITIMERSSFEKNPID | |
| | FLEAKGYKEVKKDLIIKLPKYSLFELENGRKRMLASAGELQKGNELALPSKYVNFLYLA | |
| | SHYEKLKGSPEDNEQKQLFVEQHKHYLDEIIEQISEFSKRVILADANLDKVLSAYNKHR | |
| | DKPIREQAENIIHLFTLTNLGAPAAFKYFDTTIDRKRYTSTKEVLDATLIHQSITGLYE | |
| | TRIDLSQLGGD | |
| Cas9 nickase | MDKKYSIGLDIGTNSVGWAVITDEYKVPSKKFKVLGNTDRHSIKKNLIGALLFDSGETA | SEQ ID NO: |
| Streptococcus | EATRLKRTARRRYTRRKNRICYLQEIFSNEMAKVDDSFFHRLEESFLVEEDKKHERHPI | 366 |
| pyogenes | FGNIVDEVAYHEKYPTIYHLRKKLVDSTDKADLRLIYLALAHMIKFRGHFLIEGDLNPD | |
| Q99ZW2 Cas9 | NSDVDKLFIQLVQTYNQLFEENPINASGVDAKAILSARLSKSRRLENLIAQLPGEKKNG | |
| with E762A | LFGNLIALSLGLTPNFKSNFDLAEDAKLQLSKDTYDDDLDNLLAQIGDQYADLFLAAKN | |
| | LSDAILLSDILRVNTEITKAPLSASMIKRYDEHHQDLTLLKALVRQQLPEKYKEIFFDQ | |
| | SKNGYAGYIDGGASQEEFYKFIKPILEKMDGTEELLVKLNREDLLRKQRTFDNGSIPHQ | |
| | IHLGELHAILRRQEDFYPFLKDNREKIEKILTFRIPYYVGPLARGNSRFAWMTRKSEET | |
| | ITPWNFEEVVDKGASAQSFIERMTNFDKNLPNEKVLPKHSLLYEYFTVYNELTKVKYVT | |
| | EGMRKPAFLSGEQKKAIVDLLFKTNRKVTVKQLKEDYFKKIECFDSVEISGVEDRFNAS | |
| | LGTYHDLLKIIKDKDFLDNEENEDILEDIVLTLTLFEDREMIEERLKTYAHLFDDKVMK | |
| | QLKRRRYTGWGRLSRKLINGIRDKQSGKTILDFLKSDGFANRNFMQLIHDDSLTFKEDI | |
| | QKAQVSGQGDSLHEHIANLAGSPAIKKGILQTVKVVDELVKVMGRHKPENIVIAMAREN | |
| | QTTQKGQKNSRERMKRIEEGIKELGSQILKEHPVENTQLQNEKLYLYYLQNGRDMYVDQ | |
| | ELDINRLSDYDVDHIVPQSFLKDDSIDNKVLTRSDKNRGKSDNVPSEEVVKKMKNYWRQ | |
| | LLNAKLITQRKFDNLTKAERGGLSELDKAGFIKRQLVETRQITKHVAQILDSRMNTKYD | |
| | ENDKLIREVKVITLKSKLVSDFRKDFQFYKVREINNYHHAHDAYLNAVVGTALIKKYPK | |
| | LESEFVYGDYKVYDVRKMIAKSEQEIGKATAKYFFYSNIMNFFKTEITLANGEIRKRPL | |
| | IETNGETGEIVWDKGRDFATVRKVLSMPQVNIVKKTEVQTGGFSKESILPKRNSDKLIA | |
| | RKKDWDPKKYGGFDSPTVAYSVLVVAKVEKGKSKKLKSVKELLGITIMERSSFEKNPID | |
| | FLEAKGYKEVKKDLIIKLPKYSLFELENGRKRMLASAGELQKGNELALPSKYVNFLYLA | |
| | SHYEKLKGSPEDNEQKQLFVEQHKHYLDEIIEQISEFSKRVILADANLDKVLSAYNKHR | |
| | DKPIREQAENIIHLFTLTNLGAPAAFKYFDTTIDRKRYTSTKEVLDATLIHQSITGLYE | |
| | TRIDLSQLGGD | |
| Cas9 nickase | MDKKYSIGLDIGTNSVGWAVITDEYKVPSKKFKVLGNTDRHSIKKNLIGALLFDSGETA | SEQ ID NO: |
| Streptococcus | EATRLKRTARRRYTRRKNRICYLQEIFSNEMAKVDDSFFHRLEESFLVEEDKKHERHPI | 367 |
| pyogenes | FGNIVDEVAYHEKYPTIYHLRKKLVDSTDKADLRLIYLALAHMIKFRGHFLIEGDLNPD | |
| Q99ZW2 Cas9 | NSDVDKLFIQLVQTYNQLFEENPINASGVDAKAILSARLSKSRRLENLIAQLPGEKKNG | |
| with H983A | LFGNLIALSLGLTPNFKSNFDLAEDAKLQLSKDTYDDDLDNLLAQIGDQYADLFLAAKN | |
| | LSDAILLSDILRVNTEITKAPLSASMIKRYDEHHQDLTLLKALVRQQLPEKYKEIFFDQ | |
| | SKNGYAGYIDGGASQEEFYKFIKPILEKMDGTEELLVKLNREDLLRKQRTFDNGSIPHQ | |
| | IHLGELHAILRRQEDFYPFLKDNREKIEKILTFRIPYYVGPLARGNSRFAWMTRKSEET | |
| | ITPWNFEEVVDKGASAQSFIERMTNFDKNLPNEKVLPKHSLLYEYFTVYNELTKVKYVT | |
| | EGMRKPAFLSGEQKKAIVDLLFKTNRKVTVKQLKEDYFKKIECFDSVEISGVEDRFNAS | |
| | LGTYHDLLKIIKDKDFLDNEENEDILEDIVLTLTLFEDREMIEERLKTYAHLFDDKVMK | |
| | QLKRRRYTGWGRLSRKLINGIRDKQSGKTILDFLKSDGFANRNFMQLIHDDSLTFKEDI | |
| | QKAQVSGQGDSLHEHIANLAGSPAIKKGILQTVKVVDELVKVMGRHKPENIVIEMAREN | |
| | QTTQKGQKNSRERMKRIEEGIKELGSQILKEHPVENTQLQNEKLYLYYLQNGRDMYVDQ | |
| | ELDINRLSDYDVDHIVPQSFLKDDSIDNKVLTRSDKNRGKSDNVPSEEVVKKMKNYWRQ | |
| | LLNAKLITQRKFDNLTKAERGGLSELDKAGFIKRQLVETRQITKHVAQILDSRMNTKYD | |
| | ENDKLIREVKVITLKSKLVSDFRKDFQFYKVREINNYHAAHDAYLNAVVGTALIKKYPK | |
| | LESEFVYGDYKVYDVRKMIAKSEQEIGKATAKYFFYSNIMNFFKTEITLANGEIRKRPL | |
| | IETNGETGEIVWDKGRDFATVRKVLSMPQVNIVKKTEVQTGGFSKESILPKRNSDKLIA | |
| | RKKDWDPKKYGGFDSPTVAYSVLVVAKVEKGKSKKLKSVKELLGITIMERSSFEKNPID | |
| | FLEAKGYKEVKKDLIIKLPKYSLFELENGRKRMLASAGELQKGNELALPSKYVNFLYLA | |
| | SHYEKLKGSPEDNEQKQLFVEQHKHYLDEIIEQISEFSKRVILADANLDKVLSAYNKHR | |
| | DKPIREQAENIIHLFTLTNLGAPAAFKYFDTTIDRKRYTSTKEVLDATLIHQSITGLYE | |
| | TRIDLSQLGGD | |
| Cas9 nickase | MDKKYSIGLDIGTNSVGWAVITDEYKVPSKKFKVLGNTDRHSIKKNLIGALLFDSGETA | SEQ ID NO: |
| Streptococcus | EATRLKRTARRRYTRRKNRICYLQEIFSNEMAKVDDSFFHRLEESFLVEEDKKHERHPI | 368 |
| pyogenes | FGNIVDEVAYHEKYPTIYHLRKKLVDSTDKADLRLIYLALAHMIKFRGHFLIEGDLNPD | |
| Q99ZW2 Cas9 | NSDVDKLFIQLVQTYNQLFEENPINASGVDAKAILSARLSKSRRLENLIAQLPGEKKNG | |
| with D986A | LFGNLIALSLGLTPNFKSNFDLAEDAKLQLSKDTYDDDLDNLLAQIGDQYADLFLAAKN | |
| | LSDAILLSDILRVNTEITKAPLSASMIKRYDEHHQDLTLLKALVRQQLPEKYKEIFFDQ | |
| | SKNGYAGYIDGGASQEEFYKFIKPILEKMDGTEELLVKLNREDLLRKQRTFDNGSIPHQ | |
| | IHLGELHAILRRQEDFYPFLKDNREKIEKILTFRIPYYVGPLARGNSRFAWMTRKSEET | |
| | ITPWNFEEVVDKGASAQSFIERMTNFDKNLPNEKVLPKHSLLYEYFTVYNELTKVKYVT | |
| | EGMRKPAFLSGEQKKAIVDLLFKTNRKVTVKQLKEDYFKKIECFDSVEISGVEDRFNAS | |
| | LGTYHDLLKIIKDKDFLDNEENEDILEDIVLTLTLFEDREMIEERLKTYAHLFDDKVMK | |
| | QLKRRRYTGWGRLSRKLINGIRDKQSGKTILDFLKSDGFANRNFMQLIHDDSLTFKEDI | |
| | QKAQVSGQGDSLHEHIANLAGSPAIKKGILQTVKVVDELVKVMGRHKPENIVIEMAREN | |
| | QTTQKGQKNSRERMKRIEEGIKELGSQILKEHPVENTQLQNEKLYLYYLQNGRDMYVDQ | |
| | ELDINRLSDYDVDHIVPQSFLKDDSIDNKVLTRSDKNRGKSDNVPSEEVVKKMKNYWRQ | |
| | LLNAKLITQRKFDNLTKAERGGLSELDKAGFIKRQLVETRQITKHVAQILDSRMNTKYD | |
| | ENDKLIREVKVITLKSKLVSDFRKDFQFYKVREINNYHHAHAAYLNAVVGTALIKKYPK | |
| | LESEFVYGDYKVYDVRKMIAKSEQEIGKATAKYFFYSNIMNFFKTEITLANGEIRKRPL | |
| | IETNGETGEIVWDKGRDFATVRKVLSMPQVNIVKKTEVQTGGFSKESILPKRNSDKLIA | |
| | RKKDWDPKKYGGFDSPTVAYSVLVVAKVEKGKSKKLKSVKELLGITIMERSSFEKNPID | |
| | FLEAKGYKEVKKDLIIKLPKYSLFELENGRKRMLASAGELQKGNELALPSKYVNFLYLA | |
| | SHYEKLKGSPEDNEQKQLFVEQHKHYLDEIIEQISEFSKRVILADANLDKVLSAYNKHR | |
| | DKPIREQAENIIHLFTLTNLGAPAAFKYFDTTIDRKRYTSTKEVLDATLIHQSITGLYE | |
| | TRIDLSQLGGD | |
| Cas9 nickase | MGKRNYILGLAIGITSVGYGIIDYETRDVIDAGVRLFKEANVENNEGRRSKRGARRLKRRRRHRIQR | SEQ ID NO: |
| Staphylococcus | VKKLLFDYNLLTDHSELSGINPYEARVKGLSQKLSEEEFSAALLHLAKRRGVHNVNEVEEDTGNELS | 438 |
| aureus | TKEQISRNSKALEEKYVAELQLERLKKDGEVRGSINRFKTSDYVKEAKQLLKVQKAYHQLDQSFIDT | |
| (SaCas9) | YIDLLETRRTYYEGPGEGSPFGWKDIKEWYEMLMGHCTYFPEELRSVKYAYNADLYNALNDLNNLVI | |
| with D10A | TRDENEKLEYYEKFQIIENVFKQKKKPTLKQIAKEILVNEEDIKGYRVTSTGKPEFTNLKVYHDIKD | |
| | ITARKEIIENAELLDQIAKILTIYQSSEDIQEELTNLNSELTQEEIEQISNLKGYTGTHNLSLKAIN | |
| | LILDELWHTNDNQIAIFNRLKLVPKKVDLSQQKEIPTTLVDDFILSPVVKRSFIQSIKVINAIIKKY | |
| | GLPNDIIIELAREKNSKDAQKMINEMQKRNRQTNERIEEIIRTTGKENAKYLIEKIKLHDMQEGKCL | |
| | YSLEAIPLEDLLNNPFNYEVDHIIPRSVSFDNSFNNKVLVKQEENSKKGNRTPFQYLSSSDSKISYE | |
| | TFKKHILNLAKGKGRISKTKKEYLLEERDINRFSVQKDFINRNLVDTRYATRGLMNLLRSYFRVNNL | |
| | DVKVKSINGGFTSFLRRKWKFKKERNKGYKHHAEDALIIANADFIFKEWKKLDKAKKVMENQMFEEK | |
| | QAESMPEIETEQEYKEIFITPHQIKHIKDFKDYKYSHRVDKKPNRKLINDTLYSTRKDDKGNTLIVN | |
| | NLNGLYDKDNDKLKKLINKSPEKLLMYHHDPQTYQKLKLIMEQYGDEKNPLYKYYEETGNYLTKYSK | |
| | KDNGPVIKKIKYYGNKLNAHLDITDDYPNSRNKVVKLSLKPYRFDVYLDNGVYKFVTVKNLDVIKKE | |
| | NYYEVNSKCYEEAKKLKKISNQAEFIASFYKNDLIKINGELYRVIGVNNDLLNRIEVNMIDITYREY | |
| | LENMNDKRPPHIIKTIASKTQSIKKYSTDILGNLYEVKSKKHPQIIKK | |

[0216] In another embodiment, the Cas9 nickase comprises a mutation in the HNH domain which inactivates the HNH nuclease activity. For example, mutations in histidine (H) 840 or asparagine (R) 863 have been reported as loss-of-function mutations of the HNH nuclease domain and the creation of a functional Cas9 nickase (e.g., Nishimasu et al., “Crystal structure of Cas9 in complex with guide RNA and target DNA,” Cell 156(5), 935-949, which is incorporated herein by reference). Thus, nickase mutations in the HNH domain could include H840X and R863X, wherein X is any amino acid other than the wild type amino acid. In certain embodiments, the nickase could be H840A or R863A or a combination thereof.

[0217] In various embodiments, the Cas9 nickase can have a mutation in the HNH nuclease domain and have one of the following amino acid sequences, or a variant thereof having an amino acid sequence that has at least 80%, at least 85%, at least 90%, at least 95%, or at least 99% sequence identity thereto.

| Description | Sequence | SEQ ID NO: |
|---|---|---|
| Cas9 nickase | MDKKYSIGLDIGTNSVGWAVITDEYKVPSKKFKVLGNTDRHSIKKNLIGALLFDSGETA | SEQ ID NO: |
| Streptococcus | EATRLKRTARRRYTRRKNRICYLQEIFSNEMAKVDDSFFHRLEESFLVEEDKKHERHPI | 369 |
| pyogenes | FGNIVDEVAYHEKYPTIYHLRKKLVDSTDKADLRLIYLALAHMIKFRGHFLIEGDLNPD | |
| Q99ZW2 Cas9 | NSDVDKLFIQLVQTYNQLFEENPINASGVDAKAILSARLSKSRRLENLIAQLPGEKKNG | |
| with H840X, | LFGNLIALSLGLTPNFKSNFDLAEDAKLQLSKDTYDDDLDNLLAQIGDQYADLFLAAKN | |
| wherein X is | LSDAILLSDILRVNTEITKAPLSASMIKRYDEHHQDLTLLKALVRQQLPEKYKEIFFDQ | |
| any alternate | SKNGYAGYIDGGASQEEFYKFIKPILEKMDGTEELLVKLNREDLLRKQRTFDNGSIPHQ | |
| amino acid | IHLGELHAILRRQEDFYPFLKDNREKIEKILTFRIPYYVGPLARGNSRFAWMTRKSEET | |
| | ITPWNFEEVVDKGASAQSFIERMTNFDKNLPNEKVLPKHSLLYEYFTVYNELTKVKYVT | |
| | EGMRKPAFLSGEQKKAIVDLLFKTNRKVTVKQLKEDYFKKIECFDSVEISGVEDRFNAS | |
| | LGTYHDLLKIIKDKDFLDNEENEDILEDIVLTLTLFEDREMIEERLKTYAHLFDDKVMK | |
| | QLKRRRYTGWGRLSRKLINGIRDKQSGKTILDFLKSDGFANRNFMQLIHDDSLTFKEDI | |
| | QKAQVSGQGDSLHEHIANLAGSPAIKKGILQTVKVVDELVKVMGRHKPENIVIEMAREN | |
| | QTTQKGQKNSRERMKRIEEGIKELGSQILKEHPVENTQLQNEKLYLYYLQNGRDMYVDQ | |
| | ELDINRLSDYDVDXIVPQSFLKDDSIDNKVLTRSDKNRGKSDNVPSEEVVKKMKNYWRQ | |
| | LLNAKLITQRKFDNLTKAERGGLSELDKAGFIKRQLVETRQITKHVAQILDSRMNTKYD | |
| | ENDKLIREVKVITLKSKLVSDFRKDFQFYKVREINNYHHAHDAYLNAVVGTALIKKYPK | |
| | LESEFVYGDYKVYDVRKMIAKSEQEIGKATAKYFFYSNIMNFFKTEITLANGEIRKRPL | |
| | IETNGETGEIVWDKGRDFATVRKVLSMPQVNIVKKTEVQTGGFSKESILPKRNSDKLIA | |
| | RKKDWDPKKYGGFDSPTVAYSVLVVAKVEKGKSKKLKSVKELLGITIMERSSFEKNPID | |
| | FLEAKGYKEVKKDLIIKLPKYSLFELENGRKRMLASAGELQKGNELALPSKYVNFLYLA | |
| | SHYEKLKGSPEDNEQKQLFVEQHKHYLDEIIEQISEFSKRVILADANLDKVLSAYNKHR | |
| | DKPIREQAENIIHLFTLTNLGAPAAFKYFDTTIDRKRYTSTKEVLDATLIHQSITGLYE | |
| | TRIDLSQLGGD | |
| Cas9 nickase | MDKKYSIGLDIGTNSVGWAVITDEYKVPSKKFKVLGNTDRHSIKKNLIGALLFDSGETA | SEQ ID NO: |
| Streptococcus | EATRLKRTARRRYTRRKNRICYLQEIFSNEMAKVDDSFFHRLEESFLVEEDKKHERHPI | 370 |
| pyogenes | FGNIVDEVAYHEKYPTIYHLRKKLVDSTDKADLRLIYLALAHMIKFRGHFLIEGDLNPD | |
| Q99ZW2 Cas9 | NSDVDKLFIQLVQTYNQLFEENPINASGVDAKAILSARLSKSRRLENLIAQLPGEKKNG | |
| with H840A, | LFGNLIALSLGLTPNFKSNFDLAEDAKLQLSKDTYDDDLDNLLAQIGDQYADLFLAAKN | |
| wherein X is | LSDAILLSDILRVNTEITKAPLSASMIKRYDEHHQDLTLLKALVRQQLPEKYKEIFFDQ | |
| any alternate | SKNGYAGYIDGGASQEEFYKFIKPILEKMDGTEELLVKLNREDLLRKQRTFDNGSIPHQ | |
| amino acid | IHLGELHAILRRQEDFYPFLKDNREKIEKILTFRIPYYVGPLARGNSRFAWMTRKSEET | |
| | ITPWNFEEVVDKGASAQSFIERMTNFDKNLPNEKVLPKHSLLYEYFTVYNELTKVKYVT | |
| | EGMRKPAFLSGEQKKAIVDLLFKTNRKVTVKQLKEDYFKKIECFDSVEISGVEDRFNAS | |
| | LGTYHDLLKIIKDKDFLDNEENEDILEDIVLTLTLFEDREMIEERLKTYAHLFDDKVMK | |
| | QLKRRRYTGWGRLSRKLINGIRDKQSGKTILDFLKSDGFANRNFMQLIHDDSLTFKEDI | |
| | QKAQVSGQGDSLHEHIANLAGSPAIKKGILQTVKVVDELVKVMGRHKPENIVIEMAREN | |
| | QTTQKGQKNSRERMKRIEEGIKELGSQILKEHPVENTQLQNEKLYLYYLQNGRDMYVDQ | |
| | ELDINRLSDYDVDAIVPQSFLKDDSIDNKVLTRSDKNRGKSDNVPSEEVVKKMKNYWRQ | |
| | LLNAKLITQRKFDNLTKAERGGLSELDKAGFIKRQLVETRQITKHVAQILDSRMNTKYD | |
| | ENDKLIREVKVITLKSKLVSDFRKDFQFYKVREINNYHHAHDAYLNAVVGTALIKKYPK | |
| | LESEFVYGDYKVYDVRKMIAKSEQEIGKATAKYFFYSNIMNFFKTEITLANGEIRKRPL | |
| | IETNGETGEIVWDKGRDFATVRKVLSMPQVNIVKKTEVQTGGFSKESILPKRNSDKLIA | |
| | RKKDWDPKKYGGFDSPTVAYSVLVVAKVEKGKSKKLKSVKELLGITIMERSSFEKNPID | |
| | FLEAKGYKEVKKDLIIKLPKYSLFELENGRKRMLASAGELQKGNELALPSKYVNFLYLA | |
| | SHYEKLKGSPEDNEQKQLFVEQHKHYLDEIIEQISEFSKRVILADANLDKVLSAYNKHR | |
| | DKPIREQAENIIHLFTLTNLGAPAAFKYFDTTIDRKRYTSTKEVLDATLIHQSITGLYE | |
| | TRIDLSQLGGD | |
| Cas9 nickase | MDKKYSIGLDIGTNSVGWAVITDEYKVPSKKFKVLGNTDRHSIKKNLIGALLFDSGETA | SEQ ID NO: |
| Streptococcus | EATRLKRTARRRYTRRKNRICYLQEIFSNEMAKVDDSFFHRLEESFLVEEDKKHERHPI | 371 |
| pyogenes | FGNIVDEVAYHEKYPTIYHLRKKLVDSTDKADLRLIYLALAHMIKFRGHFLIEGDLNPD | |
| Q99ZW2 Cas9 | NSDVDKLFIQLVQTYNQLFEENPINASGVDAKAILSARLSKSRRLENLIAQLPGEKKNG | |
| with R863X, | LFGNLIALSLGLTPNFKSNFDLAEDAKLQLSKDTYDDDLDNLLAQIGDQYADLFLAAKN | |
| wherein X is | LSDAILLSDILRVNTEITKAPLSASMIKRYDEHHQDLTLLKALVRQQLPEKYKEIFFDQ | |
| any alternate | SKNGYAGYIDGGASQEEFYKFIKPILEKMDGTEELLVKLNREDLLRKQRTFDNGSIPHQ | |
| amino acid | IHLGELHAILRRQEDFYPFLKDNREKIEKILTFRIPYYVGPLARGNSRFAWMTRKSEET | |
| | ITPWNFEEVVDKGASAQSFIERMTNFDKNLPNEKVLPKHSLLYEYFTVYNELTKVKYVT | |
| | EGMRKPAFLSGEQKKAIVDLLFKTNRKVTVKQLKEDYFKKIECFDSVEISGVEDRFNAS | |
| | LGTYHDLLKIIKDKDFLDNEENEDILEDIVLTLTLFEDREMIEERLKTYAHLFDDKVMK | |
| | QLKRRRYTGWGRLSRKLINGIRDKQSGKTILDFLKSDGFANRNFMQLIHDDSLTFKEDI | |
| | QKAQVSGQGDSLHEHIANLAGSPAIKKGILQTVKVVDELVKVMGRHKPENIVIEMAREN | |
| | QTTQKGQKNSRERMKRIEEGIKELGSQILKEHPVENTQLQNEKLYLYYLQNGRDMYVDQ | |
| | ELDINRLSDYDVDHIVPQSFLKDDSIDNKVLTRSDKNXGKSDNVPSEEVVKKMKNYWRQ | |
| | LLNAKLITQRKFDNLTKAERGGLSELDKAGFIKRQLVETRQITKHVAQILDSRMNTKYD | |
| | ENDKLIREVKVITLKSKLVSDFRKDFQFYKVREINNYHHAHDAYLNAVVGTALIKKYPK | |
| | LESEFVYGDYKVYDVRKMIAKSEQEIGKATAKYFFYSNIMNFFKTEITLANGEIRKRPL | |
| | IETNGETGEIVWDKGRDFATVRKVLSMPQVNIVKKTEVQTGGFSKESILPKRNSDKLIA | |
| | RKKDWDPKKYGGFDSPTVAYSVLVVAKVEKGKSKKLKSVKELLGITIMERSSFEKNPID | |
| | FLEAKGYKEVKKDLIIKLPKYSLFELENGRKRMLASAGELQKGNELALPSKYVNFLYLA | |
| | SHYEKLKGSPEDNEQKQLFVEQHKHYLDEIIEQISEFSKRVILADANLDKVLSAYNKHR | |
| | DKPIREQAENIIHLFTLTNLGAPAAFKYFDTTIDRKRYTSTKEVLDATLIHQSITGLYE | |
| | TRIDLSQLGGD | |
| Cas9 nickase | MDKKYSIGLDIGTNSVGWAVITDEYKVPSKKFKVLGNTDRHSIKKNLIGALLFDSGETA | SEQ ID NO: |
| Streptococcus | EATRLKRTARRRYTRRKNRICYLQEIFSNEMAKVDDSFFHRLEESFLVEEDKKHERHPI | 372 |
| pyogenes | FGNIVDEVAYHEKYPTIYHLRKKLVDSTDKADLRLIYLALAHMIKFRGHFLIEGDLNPD | |
| Q99ZW2 Cas9 | NSDVDKLFIQLVQTYNQLFEENPINASGVDAKAILSARLSKSRRLENLIAQLPGEKKNG | |
| with R863A, | LFGNLIALSLGLTPNFKSNFDLAEDAKLQLSKDTYDDDLDNLLAQIGDQYADLFLAAKN | |
| wherein X is | LSDAILLSDILRVNTEITKAPLSASMIKRYDEHHQDLTLLKALVRQQLPEKYKEIFFDQ | |
| any alternate | SKNGYAGYIDGGASQEEFYKFIKPILEKMDGTEELLVKLNREDLLRKQRTFDNGSIPHQ | |
| amino acid | IHLGELHAILRRQEDFYPFLKDNREKIEKILTFRIPYYVGPLARGNSRFAWMTRKSEET | |
| | ITPWNFEEVVDKGASAQSFIERMTNFDKNLPNEKVLPKHSLLYEYFTVYNELTKVKYVT | |
| | EGMRKPAFLSGEQKKAIVDLLFKTNRKVTVKQLKEDYFKKIECFDSVEISGVEDRFNAS | |
| | LGTYHDLLKIIKDKDFLDNEENEDILEDIVLTLTLFEDREMIEERLKTYAHLFDDKVMK | |
| | QLKRRRYTGWGRLSRKLINGIRDKQSGKTILDFLKSDGFANRNFMQLIHDDSLTFKEDI | |
| | QKAQVSGQGDSLHEHIANLAGSPAIKKGILQTVKVVDELVKVMGRHKPENIVIEMAREN | |
| | QTTQKGQKNSRERMKRIEEGIKELGSQILKEHPVENTQLQNEKLYLYYLQNGRDMYVDQ | |
| | ELDINRLSDYDVDHIVPQSFLKDDSIDNKVLTRSDKNAGKSDNVPSEEVVKKMKNYWRQ | |
| | LLNAKLITQRKFDNLTKAERGGLSELDKAGFIKRQLVETRQITKHVAQILDSRMNTKYD | |
| | ENDKLIREVKVITLKSKLVSDFRKDFQFYKVREINNYHHAHDAYLNAVVGTALIKKYPK | |
| | LESEFVYGDYKVYDVRKMIAKSEQEIGKATAKYFFYSNIMNFFKTEITLANGEIRKRPL | |
| | IETNGETGEIVWDKGRDFATVRKVLSMPQVNIVKKTEVQTGGFSKESILPKRNSDKLIA | |
| | RKKDWDPKKYGGFDSPTVAYSVLVVAKVEKGKSKKLKSVKELLGITIMERSSFEKNPID | |
| | FLEAKGYKEVKKDLIIKLPKYSLFELENGRKRMLASAGELQKGNELALPSKYVNFLYLA | |
| | SHYEKLKGSPEDNEQKQLFVEQHKHYLDEIIEQISEFSKRVILADANLDKVLSAYNKHR | |
| | DKPIREQAENIIHLFTLTNLGAPAAFKYFDTTIDRKRYTSTKEVLDATLIHQSITGLYE | |
| | TRIDLSQLGGD | |

[0218] In some embodiments, the N-terminal methionine is removed from a Cas9 nickase, or from any Cas9 variant, ortholog, or equivalent disclosed or contemplated herein. For example, methionine-minus Cas9 nickases include the following sequences, or a variant thereof having an amino acid sequence that has at least 80%, at least 85%, at least 90%, at least 95%, or at least 99% sequence identity thereto.

| Description | Sequence |
|---|---|
| Cas9 nickase | DKKYSIGLDIGTNSVGWAVITDEYKVPSKKFKVLGNTDRHSIKKNLIGALLFDSGETAEATRLKRTARRRYTR |
| (Met minus) | RKNRICYLQEIFSNEMAKVDDSFFHRLEESFLVEEDKKHERHPIFGNIVDEVAYHEKYPTIYHLRKKLVDSTD |
| Streptococcus | KADLRLIYLALAHMIKFRGHFLIEGDLNPDNSDVDKLFIQLVQTYNQLFEENPINASGVDAKAILSARLSKSR |
| pyogenes | RLENLIAQLPGEKKNGLFGNLIALSLGLTPNFKSNFDLAEDAKLQLSKDTYDDDLDNLLAQIGDQYADLFLAA |
| Q99ZW2 Cas9 | KNLSDAILLSDILRVNTEITKAPLSASMIKRYDEHHQDLTLLKALVRQQLPEKYKEIFFDQSKNGYAGYIDGG |
| with H840X, | ASQEEFYKFIKPILEKMDGTEELLVKLNREDLLRKQRTFDNGSIPHQIHLGELHAILRRQEDFYPFLKDNREK |
| wherein X is | IEKILTFRIPYYVGPLARGNSRFAWMTRKSEETITPWNFEEVVDKGASAQSFIERMTNFDKNLPNEKVLPKHS |
| any alternate | LLYEYFTVYNELTKVKYVTEGMRKPAFLSGEQKKAIVDLLFKTNRKVTVKQLKEDYFKKIECFDSVEISGVED |
| amino acid | RFNASLGTYHDLLKIIKDKDFLDNEENEDILEDIVLTLTLFEDREMIEERLKTYAHLFDDKVMKQLKRRRYTG |
| | WGRLSRKLINGIRDKQSGKTILDFLKSDGFANRNFMQLIHDDSLTFKEDIQKAQVSGQGDSLHEHIANLAGSP |
| | AIKKGILQTVKVVDELVKVMGRHKPENIVIEMARENQTTQKGQKNSRERMKRIEEGIKELGSQILKEHPVENT |
| | QLQNEKLYLYYLQNGRDMYVDQELDINRLSDYDVDXIVPQSFLKDDSIDNKVLTRSDKNRGKSDNVPSEEVVK |
| | KMKNYWRQLLNAKLITQRKFDNLTKAERGGLSELDKAGFIKRQLVETRQITKHVAQILDSRMNTKYDENDKLI |
| | REVKVITLKSKLVSDFRKDFQFYKVREINNYHHAHDAYLNAVVGTALIKKYPKLESEFVYGDYKVYDVRKMIA |
| | KSEQEIGKATAKYFFYSNIMNFFKTEITLANGEIRKRPLIETNGETGEIVWDKGRDFATVRKVLSMPQVNIVK |
| | KTEVQTGGFSKESILPKRNSDKLIARKKDWDPKKYGGFDSPTVAYSVLVVAKVEKGKSKKLKSVKELLGITIM |
| | ERSSFEKNPIDFLEAKGYKEVKKDLIIKLPKYSLFELENGRKRMLASAGELQKGNELALPSKYVNFLYLASHY |
| | EKLKGSPEDNEQKQLFVEQHKHYLDEIIEQISEFSKRVILADANLDKVLSAYNKHRDKPIREQAENIIHLFTL |
| | TNLGAPAAFKYFDTTIDRKRYTSTKEVLDATLIHQSITGLYETRIDLSQLGGD (SEQ ID NO: 373) |
| Cas9 nickase | DKKYSIGLDIGTNSVGWAVITDEYKVPSKKFKVLGNTDRHSIKKNLIGALLFDSGETAEATRLKRTARRRYTR |
| (Met minus) | RKNRICYLQEIFSNEMAKVDDSFFHRLEESFLVEEDKKHERHPIFGNIVDEVAYHEKYPTIYHLRKKLVDSTD |
| Streptococcus | KADLRLIYLALAHMIKFRGHFLIEGDLNPDNSDVDKLFIQLVQTYNQLFEENPINASGVDAKAILSARLSKSR |
| pyogenes | RLENLIAQLPGEKKNGLFGNLIALSLGLTPNFKSNFDLAEDAKLQLSKDTYDDDLDNLLAQIGDQYADLFLAA |
| Q99ZW2 Cas9 | KNLSDAILLSDILRVNTEITKAPLSASMIKRYDEHHQDLTLLKALVRQQLPEKYKEIFFDQSKNGYAGYIDGG |
| with H840A, | ASQEEFYKFIKPILEKMDGTEELLVKLNREDLLRKQRTFDNGSIPHQIHLGELHAILRRQEDFYPFLKDNREK |
| wherein X is | IEKILTFRIPYYVGPLARGNSRFAWMTRKSEETITPWNFEEVVDKGASAQSFIERMTNFDKNLPNEKVLPKHS |
| any alternate | LLYEYFTVYNELTKVKYVTEGMRKPAFLSGEQKKAIVDLLFKTNRKVTVKQLKEDYFKKIECFDSVEISGVED |
| amino acid | RFNASLGTYHDLLKIIKDKDFLDNEENEDILEDIVLTLTLFEDREMIEERLKTYAHLFDDKVMKQLKRRRYTG |
| | WGRLSRKLINGIRDKQSGKTILDFLKSDGFANRNFMQLIHDDSLTFKEDIQKAQVSGQGDSLHEHIANLAGSP |
| | AIKKGILQTVKVVDELVKVMGRHKPENIVIEMARENQTTQKGQKNSRERMKRIEEGIKELGSQILKEHPVENT |
| | QLQNEKLYLYYLQNGRDMYVDQELDINRLSDYDVDAIVPQSFLKDDSIDNKVLTRSDKNRGKSDNVPSEEVVK |
| | KMKNYWRQLLNAKLITQRKFDNLTKAERGGLSELDKAGFIKRQLVETRQITKHVAQILDSRMNTKYDENDKLI |
| | REVKVITLKSKLVSDFRKDFQFYKVREINNYHHAHDAYLNAVVGTALIKKYPKLESEFVYGDYKVYDVRKMIA |
| | KSEQEIGKATAKYFFYSNIMNFFKTEITLANGEIRKRPLIETNGETGEIVWDKGRDFATVRKVLSMPQVNIVK |
| | KTEVQTGGFSKESILPKRNSDKLIARKKDWDPKKYGGFDSPTVAYSVLVVAKVEKGKSKKLKSVKELLGITIM |
| | ERSSFEKNPIDFLEAKGYKEVKKDLIIKLPKYSLFELENGRKRMLASAGELQKGNELALPSKYVNFLYLASHY |
| | EKLKGSPEDNEQKQLFVEQHKHYLDEIIEQISEFSKRVILADANLDKVLSAYNKHRDKPIREQAENIIHLFTL |
| | TNLGAPAAFKYFDTTIDRKRYTSTKEVLDATLIHQSITGLYETRIDLSQLGGD (SEQ ID NO: 374) |
| Cas9 nickase | DKKYSIGLDIGTNSVGWAVITDEYKVPSKKFKVLGNTDRHSIKKNLIGALLFDSGETAEATRLKRTARRRYTR |
| (Met minus) | RKNRICYLQEIFSNEMAKVDDSFFHRLEESFLVEEDKKHERHPIFGNIVDEVAYHEKYPTIYHLRKKLVDSTD |
| Streptococcus | KADLRLIYLALAHMIKFRGHFLIEGDLNPDNSDVDKLFIQLVQTYNQLFEENPINASGVDAKAILSARLSKSR |
| pyogenes | RLENLIAQLPGEKKNGLFGNLIALSLGLTPNFKSNFDLAEDAKLQLSKDTYDDDLDNLLAQIGDQYADLFLAA |
| Q99ZW2 Cas9 | KNLSDAILLSDILRVNTEITKAPLSASMIKRYDEHHQDLTLLKALVRQQLPEKYKEIFFDQSKNGYAGYIDGG |
| with R863X, | ASQEEFYKFIKPILEKMDGTEELLVKLNREDLLRKQRTFDNGSIPHQIHLGELHAILRRQEDFYPFLKDNREK |
| wherein X is | IEKILTFRIPYYVGPLARGNSRFAWMTRKSEETITPWNFEEVVDKGASAQSFIERMTNFDKNLPNEKVLPKHS |
| any alternate | LLYEYFTVYNELTKVKYVTEGMRKPAFLSGEQKKAIVDLLFKTNRKVTVKQLKEDYFKKIECFDSVEISGVED |
| amino acid | RFNASLGTYHDLLKIIKDKDFLDNEENEDILEDIVLTLTLFEDREMIEERLKTYAHLFDDKVMKQLKRRRYTG |
| | WGRLSRKLINGIRDKQSGKTILDFLKSDGFANRNFMQLIHDDSLTFKEDIQKAQVSGQGDSLHEHIANLAGSP |
| | AIKKGILQTVKVVDELVKVMGRHKPENIVIEMARENQTTQKGQKNSRERMKRIEEGIKELGSQILKEHPVENT |
| | QLQNEKLYLYYLQNGRDMYVDQELDINRLSDYDVDHIVPQSFLKDDSIDNKVLTRSDKNXGKSDNVPSEEVVK |
| | KMKNYWRQLLNAKLITQRKFDNLTKAERGGLSELDKAGFIKRQLVETRQITKHVAQILDSRMNTKYDENDKLI |
| | REVKVITLKSKLVSDFRKDFQFYKVREINNYHHAHDAYLNAVVGTALIKKYPKLESEFVYGDYKVYDVRKMIA |
| | KSEQEIGKATAKYFFYSNIMNFFKTEITLANGEIRKRPLIETNGETGEIVWDKGRDFATVRKVLSMPQVNIVK |
| | KTEVQTGGFSKESILPKRNSDKLIARKKDWDPKKYGGFDSPTVAYSVLVVAKVEKGKSKKLKSVKELLGITIM |
| | ERSSFEKNPIDFLEAKGYKEVKKDLIIKLPKYSLFELENGRKRMLASAGELQKGNELALPSKYVNFLYLASHY |
| | EKLKGSPEDNEQKQLFVEQHKHYLDEIIEQISEFSKRVILADANLDKVLSAYNKHRDKPIREQAENIIHLFTL |
| | TNLGAPAAFKYFDTTIDRKRYTSTKEVLDATLIHQSITGLYETRIDLSQLGGD(SEQ ID NO: 375) |
| Cas9 nickase | DKKYSIGLDIGTNSVGWAVITDEYKVPSKKFKVLGNTDRHSIKKNLIGALLFDSGETAEATRLKRTARRRYTR |
| (Met minus) | RKNRICYLQEIFSNEMAKVDDSFFHRLEESFLVEEDKKHERHPIFGNIVDEVAYHEKYPTIYHLRKKLVDSTD |
| Streptococcus | KADLRLIYLALAHMIKFRGHFLIEGDLNPDNSDVDKLFIQLVQTYNQLFEENPINASGVDAKAILSARLSKSR |
| pyogenes | RLENLIAQLPGEKKNGLFGNLIALSLGLTPNFKSNFDLAEDAKLQLSKDTYDDDLDNLLAQIGDQYADLFLAA |
| Q99ZW2 Cas9 | KNLSDAILLSDILRVNTEITKAPLSASMIKRYDEHHQDLTLLKALVRQQLPEKYKEIFFDQSKNGYAGYIDGG |
| with R863A, | ASQEEFYKFIKPILEKMDGTEELLVKLNREDLLRKQRTFDNGSIPHQIHLGELHAILRRQEDFYPFLKDNREK |
| wherein X is | IEKILTFRIPYYVGPLARGNSRFAWMTRKSEETITPWNFEEVVDKGASAQSFIERMTNFDKNLPNEKVLPKHS |
| any alternate | LLYEYFTVYNELTKVKYVTEGMRKPAFLSGEQKKAIVDLLFKTNRKVTVKQLKEDYFKKIECFDSVEISGVED |
| amino acid | RFNASLGTYHDLLKIIKDKDFLDNEENEDILEDIVLTLTLFEDREMIEERLKTYAHLFDDKVMKQLKRRRYTG |
| | WGRLSRKLINGIRDKQSGKTILDFLKSDGFANRNFMQLIHDDSLTFKEDIQKAQVSGQGDSLHEHIANLAGSP |
| | AIKKGILQTVKVVDELVKVMGRHKPENIVIEMARENQTTQKGQKNSRERMKRIEEGIKELGSQILKEHPVENT |
| | QLQNEKLYLYYLQNGRDMYVDQELDINRLSDYDVDHIVPQSFLKDDSIDNKVLTRSDKNAGKSDNVPSEEVVK |
| | KMKNYWRQLLNAKLITQRKFDNLTKAERGGLSELDKAGFIKRQLVETRQITKHVAQILDSRMNTKYDENDKLI |
| | REVKVITLKSKLVSDFRKDFQFYKVREINNYHHAHDAYLNAVVGTALIKKYPKLESEFVYGDYKVYDVRKMIA |
| | KSEQEIGKATAKYFFYSNIMNFFKTEITLANGEIRKRPLIETNGETGEIVWDKGRDFATVRKVLSMPQVNIVK |
| | KTEVQTGGFSKESILPKRNSDKLIARKKDWDPKKYGGFDSPTVAYSVLVVAKVEKGKSKKLKSVKELLGITIM |
| | ERSSFEKNPIDFLEAKGYKEVKKDLIIKLPKYSLFELENGRKRMLASAGELQKGNELALPSKYVNFLYLASHY |
| | EKLKGSPEDNEQKQLFVEQHKHYLDEIIEQISEFSKRVILADANLDKVLSAYNKHRDKPIREQAENIIHLFTL |
| | TNLGAPAAFKYFDTTIDRKRYTSTKEVLDATLIHQSITGLYETRIDLSQLGGD (SEQ ID NO: 376) |

[0219] E. Other Cas9 Variants

[0220] The napDNAbp domains used in the base editors described herein may also include other Cas9 variants that area at least about 80% identical, at least about 90% identical, at least about 95% identical, at least about 96% identical, at least about 97% identical, at least about 98% identical, at least about 99% identical, at least about 99.5% identical, or at least about 99.9% identical to any reference Cas9 protein, including any wild type Cas9, or mutant Cas9 (e.g., a dead Cas9 or Cas9 nickase), or circular permutant Cas9, or other variant of Cas9 disclosed herein or known in the art. In some embodiments, a Cas9 variant may have 1, 2, 3, 4, 5, 6, 7, 8, 9, 10, 11, 12, 13, 14, 15, 16, 17, 18, 19, 20, 21, 22, 21, 24, 25, 26, 27, 28, 29, 30, 31, 32, 33, 34, 35, 36, 37, 38, 39, 40, 41, 42, 43, 44, 45, 46, 47, 48, 49, 50, or more amino acid changes compared to a reference Cas9. In some embodiments, the Cas9 variant comprises a fragment of a reference Cas9 (e.g., a gRNA binding domain or a DNA-cleavage domain), such that the fragment is at least about 70% identical, at least about 80% identical, at least about 90% identical, at least about 95% identical, at least about 96% identical, at least about 97% identical, at least about 98% identical, at least about 99% identical, at least about 99.5% identical, or at least about 99.9% identical to the corresponding fragment of wild type Cas9. In some embodiments, the fragment is at least 30%, at least 35%, at least 40%, at least 45%, at least 50%, at least 55%, at least 60%, at least 65%, at least 70%, at least 75%, at least 80%, at least 85%, at least 90%, at least 95% identical, at least 96%, at least 97%, at least 98%, at least 99%, or at least 99.5% of the amino acid length of a corresponding wild type Cas9 (e.g., SEQ ID NO: 326).

[0221] In some embodiments, the disclosure also may utilize Cas9 fragments which retain their functionality and which are fragments of any herein disclosed Cas9 protein. In some embodiments, the Cas9 fragment is at least 100 amino acids in length. In some embodiments, the fragment is at least 100, 150, 200, 250, 300, 350, 400, 450, 500, 550, 600, 650, 700, 750, 800, 850, 900, 950, 1000, 1050, 1100, 1150, 1200, 1250, or at least 1300 amino acids in length.

[0222] In various embodiments, the adenine base editors disclosed herein may comprise one of the Cas9 variants described as follows, or a Cas9 variant thereof having at least about 70% identical, at least about 80% identical, at least about 90% identical, at least about 95% identical, at least about 96% identical, at least about 97% identical, at least about 98% identical, at least about 99% identical, at least about 99.5% identical, or at least about 99.9% identical to any reference Cas9 variants.

[0223] F. Other Cas9 Equivalents

[0224] In some embodiments, the adenine base editors described herein can include any Cas9 equivalent. As used herein, the term “Cas9 equivalent” is a broad term that encompasses any napDNAbp protein that serves the same function as Cas9 in the present adenine base editors despite that its amino acid primary sequence and/or its three-dimensional structure may be different and/or unrelated from an evolutionary standpoint. Thus, while Cas9 equivalents include any Cas9 ortholog, homolog, mutant, or variant described or embraced herein that are evolutionarily related, the Cas9 equivalents also embrace proteins that may have evolved through convergent evolution processes to have the same or similar function as Cas9, but which do not necessarily have any similarity with regard to amino acid sequence and/or three dimensional structure. The adenine base editors described here embrace any Cas9 equivalent that would provide the same or similar function as Cas9 despite that the Cas9 equivalent may be based on a protein that arose through convergent evolution.

[0225] For example, CasX is a Cas9 equivalent that reportedly has the same function as Cas9 but which evolved through convergent evolution. Thus, the CasX protein described in Liu et al., “CasX enzymes comprises a distinct family of RNA-guided genome editors,” Nature, 2019, Vol. 566: 218-223, is contemplated to be used with the adenine base editors described herein. In addition, any variant or modification of CasX is conceivable and within the scope of the present disclosure.

[0226] Cas9 is a bacterial enzyme that evolved in a wide variety of species. However, the Cas9 equivalents contemplated herein may also be obtained from archaea, which constitute a domain and kingdom of single-celled prokaryotic microbes different from bacteria.

[0227] In some embodiments, Cas9 equivalents may refer to CasX or CasY, which have been described in, for example, Burstein et al., “New CRISPR-Cas systems from uncultivated microbes.” Cell Res. 2017 Feb. 21. doi: 10.1038/cr.2017.21, the entire contents of which is hereby incorporated by reference. Using genome-resolved metagenomics, a number of CRISPR-Cas systems were identified, including the first reported Cas9 in the archaeal domain of life. This divergent Cas9 protein was found in little-studied nanoarchaea as part of an active CRISPR-Cas system. In bacteria, two previously unknown systems were discovered, CRISPR-CasX and CRISPR-CasY, which are among the most compact systems yet discovered. In some embodiments, Cas9 refers to CasX, or a variant of CasX. In some embodiments, Cas9 refers to a CasY, or a variant of CasY. It should be appreciated that other RNA-guided DNA binding proteins may be used as a nucleic acid programmable DNA binding protein (napDNAbp), and are within the scope of this disclosure. Also see Liu et al., “CasX enzymes comprises a distinct family of RNA-guided genome editors,” Nature, 2019, Vol. 566: 218-223. Any of these Cas9 equivalents are contemplated.

[0228] In some embodiments, the Cas9 equivalent comprises an amino acid sequence that is at least 85%, at least 90%, at least 91%, at least 92%, at least 93%, at least 94%, at least 95%, at least 96%, at least 97%, at least 98%, at least 99%, or at least 99.5% identical to a naturally-occurring CasX or CasY protein. In some embodiments, the napDNAbp is a naturally-occurring CasX or CasY protein. In some embodiments, the napDNAbp comprises an amino acid sequence that is at least 85%, at least 90%, at least 91%, at least 92%, at least 93%, at least 94%, at least 95%, at least 96%, at least 97%, at least 98%, at least 99%, or at least 99.5% identical to a wild-type Cas moiety or any Cas moiety provided herein.

[0229] In various embodiments, the nucleic acid programmable DNA binding proteins include, without limitation, Cas9 (e.g., dCas9 and nCas9), CasX, CasY, Cpf1, C2c1, C2c2, C2C3, Argonaute, Cas12a, and Cas12b. One example of a nucleic acid programmable DNA-binding protein that has different PAM specificity than Cas9 is Clustered Regularly Interspaced Short Palindromic Repeats from Prevotella and Francisella 1 (Cpf1). Similar to Cas9, Cpf1 is also a class 2 CRISPR effector. It has been shown that Cpf1 mediates robust DNA interference with features distinct from Cas9. Cpf1 is a single RNA-guided endonuclease lacking tracrRNA, and it utilizes a T-rich protospacer-adjacent motif (TTN, TTTN, or YTN). Moreover, Cpf1 cleaves DNA via a staggered DNA double-stranded break. Out of 16 Cpf1-family proteins, two enzymes from Acidaminococcus and Lachnospiraceae are shown to have efficient genome-editing activity in human cells. Cpf1 proteins are known in the art and have been described previously, for example Yamano et al., “Crystal structure of Cpf1 in complex with guide RNA and target DNA.” Cell (165) 2016, p. 949-962; the entire contents of which is hereby incorporated by reference. The state of the art may also now refer to Cpf1 enzymes as Cas12a.

[0230] In still other embodiments, the Cas protein may include any CRISPR associated protein, including but not limited to, Cas12a, Cas12b, Cas1, Cas1B, Cas2, Cas3, Cas4, Cas5, Cas6, Cas7, Cas8, Cas9 (also known as Csn1 and Csx12), Cas10, Csy1, Csy2, Csy3, Cse1, Cse2, Csc1, Csc2, Csa5, Csn2. Csm2, Csm3, Csm4, Csm5, Csm6, Cmr1, Cmr3, Cmr4, Cmr5, Cmr6, Csb1, Csb2, Csb3, Csx17, Csx14, Csx10, Csx16, CsaX, Csx3, Csx1, Csx15, Csf1, Csf2, Csf3, Csf4, homologs thereof, or modified versions thereof, and preferably comprising a nickase mutation (e.g., a mutation corresponding to the D10A mutation of the wild type SpCas9 polypeptide of SEQ ID NO: 326).

[0231] In various other embodiments, the napDNAbp can be any of the following proteins: a Cas9, a Cpf1, a CasX, a CasY, a C2c1, a C2c2, a C2c3, a GeoCas9, a CjCas9, a Cas12a, a Cas12b, a Cas12g, a Cas12h, a Cas12i, a Cas13b, a Cas13c, a Cas13d, a Cas14, a Csn2, an xCas9, an SpCas9-NG, a circularly permuted Cas9 domain such as CP1012, CP1028, CP1041, CP1249, and CP1300, or an Argonaute (Ago) domain, a Cas9-KKH, a SmacCas9, a Spy-macCas9, an SpCas9-VRQR, an SpCas9-VRER, an SpCas9-VQR, an SpCas9-EQR, an SpCas9-NRRH, an SpaCas9-NRTH, an SpCas9-NRCH, an LbCas12a, an AsCas12a, a CeCas12a, an MbCas12a, a CasΦ, an SpCas9-NG-CP1041, an SpCas9-NG-VRQR, or a variant thereof.

[0232] In certain embodiments, the adenine base editors contemplated herein can include a Cas9 protein that is of smaller molecular weight than the canonical SpCas9 sequence. In some embodiments, the smaller-sized Cas9 variants may facilitate delivery to cells, e.g., by an expression vector, nanoparticle, or other means of delivery. The canonical SpCas9 protein is 1368 amino acids in length and has a predicted molecular weight of 158 kilodaltons. The term “small-sized Cas9 variant”, as used herein, refers to any Cas9 variant—naturally occurring, engineered, or otherwise—that is less than at least 1300 amino acids, or at least less than 1290 amino acids, or than less than 1280 amino acids, or less than 1270 amino acid, or less than 1260 amino acid, or less than 1250 amino acids, or less than 1240 amino acids, or less than 1230 amino acids, or less than 1220 amino acids, or less than 1210 amino acids, or less than 1200 amino acids, or less than 1190 amino acids, or less than 1180 amino acids, or less than 1170 amino acids, or less than 1160 amino acids, or less than 1150 amino acids, or less than 1140 amino acids, or less than 1130 amino acids, or less than 1120 amino acids, or less than 1110 amino acids, or less than 1100 amino acids, or less than 1050 amino acids, or less than 1000 amino acids, or less than 950 amino acids, or less than 900 amino acids, or less than 850 amino acids, or less than 800 amino acids, or less than 750 amino acids, or less than 700 amino acids, or less than 650 amino acids, or less than 600 amino acids, or less than 550 amino acids, or less than 500 amino acids, but at least larger than about 400 amino acids and retaining the required functions of the Cas9 protein.

[0233] In various embodiments, the adenine base editors disclosed herein may comprise one of the small-sized Cas9 variants described as follows, or a Cas9 variant thereof having at least about 70% identical, at least about 80% identical, at least about 90% identical, at least about 95% identical, at least about 96% identical, at least about 97% identical, at least about 98% identical, at least about 99% identical, at least about 99.5% identical, or at least about 99.9% identical to any reference small-sized Cas9 protein. Exemplary small-sized Cas9 variants include, but are not limited to, SaCas9 and LbCas12a.

[0234] In some embodiments, the napDNAbp domain of any of the disclosed base editors comprises an LbCas12a, such as a wild-type LbCas12a. In some embodiments, the napDNAbp domain of any of the disclosed based editors is comprises at least 80%, at least 85%, at least 90%, at least 95%, or at least 99% sequence identity to SEQ ID NO: 381. In some embodiments, the napDNAbp domain of any of the disclosed base editors comprises the amino acid sequence of SEQ ID NO: 381.

[0235] In some embodiments, the napDNAbp domain of any of the disclosed base editors comprises an AsCas12a, such as a wild-type AsCas12a. In some embodiments, the napDNAbp domain of any of the disclosed base editors comprises a mutant AsCas12a, such as an engineered AsCas12a, or enAsCas12a. In some embodiments, the napDNAbp domain of any of the disclosed based editors is comprises at least 80%, at least 85%, at least 90%, at least 95%, or at least 99% sequence identity to SEQ ID NO: 383. In some embodiments, the napDNAbp domain of any of the disclosed base editors comprises the amino acid sequence of SEQ ID NO: 383.

| Description | Sequence | SEQ ID NO: |
|---|---|---|
| SaCas9 | MGKRNYILGLDIGITSVGYGIIDYETRDVIDAGVRLFKEANVENNEGRRSKRGARRLKR | SEQ ID NO: |
| Staphylococcus | RRRHRIQRVKKLLFDYNLLTDHSELSGINPYEARVKGLSQKLSEEEFSAALLHLAKRRG | 377 |
| aureus | VHNVNEVEEDTGNELSTKEQISRNSKALEEKYVAELQLERLKKDGEVRGSINRFKTSDY | |
| 1053 AA | VKEAKQLLKVQKAYHQLDQSFIDTYIDLLETRRTYYEGPGEGSPFGWKDIKEWYEMLMG | |
| 123 kDa | HCTYFPEELRSVKYAYNADLYNALNDLNNLVITRDENEKLEYYEKFQIIENVFKQKKKP | |
| | TLKQIAKEILVNEEDIKGYRVTSTGKPEFTNLKVYHDIKDITARKEIIENAELLDQIAK | |
| | ILTIYQSSEDIQEELTNLNSELTQEEIEQISNLKGYTGTHNLSLKAINLILDELWHTND | |
| | NQIAIFNRLKLVPKKVDLSQQKEIPTTLVDDFILSPVVKRSFIQSIKVINAIIKKYGLP | |
| | NDIIIELAREKNSKDAQKMINEMQKRNRQTNERIEEIIRTTGKENAKYLIEKIKLHDMQ | |
| | EGKCLYSLEAIPLEDLLNNPFNYEVDHIIPRSVSFDNSFNNKVLVKQEENSKKGNRTPF | |
| | QYLSSSDSKISYETFKKHILNLAKGKGRISKTKKEYLLEERDINRFSVQKDFINRNLVD | |
| | TRYATRGLMNLLRSYFRVNNLDVKVKSINGGFTSFLRRKWKFKKERNKGYKHHAEDALI | |
| | IANADFIFKEWKKLDKAKKVMENQMFEEKQAESMPEIETEQEYKEIFITPHQIKHIKDF | |
| | KDYKYSHRVDKKPNRKLINDTLYSTRKDDKGNTLIVNNLNGLYDKDNDKLKKLINKSPE | |
| | KLLMYHHDPQTYQKLKLIMEQYGDEKNPLYKYYEETGNYLTKYSKKDNGPVIKKIKYYG | |
| | NKLNAHLDITDDYPNSRNKVVKLSLKPYRFDVYLDNGVYKFVTVKNLDVIKKENYYEVN | |
| | SKCYEEAKKLKKISNQAEFIASFYKNDLIKINGELYRVIGVNNDLLNRIEVNMIDITYR | |
| | EYLENMNDKRPPHIIKTIASKTQSIKKYSTDILGNLYEVKSKKHPQIIKK | |
| NmeCas9 | MAAFKPNSINYILGLDIGIASVGWAMVEIDEEENPIRLIDLGVRVFERAEVPKTGDSLA | SEQ ID NO: |
| N. | MARRLARSVRRLTRRRAHRLLRTRRLLKREGVLQAANFDENGLIKSLPNTPWQLRAAAL | 378 |
| meningitidis | DRKLTPLEWSAVLLHLIKHRGYLSQRKNEGETADKELGALLKGVAGNAHALQTGDFRTP | |
| 1083 AA | AELALNKFEKESGHIRNQRSDYSHTFSRKDLQAELILLFEKQKEFGNPHVSGGLKEGIE | |
| 124.5 kDa | TLLMTQRPALSGDAVQKMLGHCTFEPAEPKAAKNTYTAERFIWLTKLNNLRILEQGSER | |
| | PLTDTERATLMDEPYRKSKLTYAQARKLLGLEDTAFFKGLRYGKDNAEASTLMEMKAYH | |
| | AISRALEKEGLKDKKSPLNLSPELQDEIGTAFSLFKTDEDITGRLKDRIQPEILEALLK | |
| | HISFDKFVQISLKALRRIVPLMEQGKRYDEACAEIYGDHYGKKNTEEKIYLPPIPADEI | |
| | RNPVVLRALSQARKVINGVVRRYGSPARIHIETAREVGKSFKDRKEIEKRQEENRKDRE | |
| | KAAAKFREYFPNFVGEPKSKDILKLRLYEQQHGKCLYSGKEINLGRLNEKGYVEIDAAL | |
| | PFSRTWDDSFNNKVLVLGSENQNKGNQTPYEYFNGKDNSREWQEFKARVETSRFPRSKK | |
| | QRILLQKFDEDGFKERNLNDTRYVNRFLCQFVADRMRLTGKGKKRVFASNGQITNLLRG | |
| | FWGLRKVRAENDRHHALDAVVVACSTVAMQQKITRFVRYKEMNAFDGKTIDKETGEVLH | |
| | QKTHFPQPWEFFAQEVMIRVFGKPDGKPEFEEADTLEKLRTLLAEKLSSRPEAVHEYVT | |
| | PLFVSRAPNRKMSGQGHMETVKSAKRLDEGVSVLRVPLTQLKLKDLEKMVNREREPKLY | |
| | EALKARLEAHKDDPAKAFAEPFYKYDKAGNRTQQVKAVRVEQVQKTGVWVRNHNGIADN | |
| | ATMVRVDVFEKGDKYYLVPIYSWQVAKGILPDRAVVQGKDEEDWQLIDDSFNFKFSLHP | |
| | NDLVEVITKKARMFGYFASCHRGTGNINIRIHDLDHKIGKNGILEGIGVKTALSFQKYQ | |
| | IDELGKEIRPCRLKKRPPVR | |
| CjCas9 | MARILAFDIGISSIGWAFSENDELKDCGVRIFTKVENPKTGESLALPRRLARSARKRLA | SEQ ID NO: |
| C. jejuni | RRKARLNHLKHLIANEFKLNYEDYQSFDESLAKAYKGSLISPYELRFRALNELLSKQDF | 379 |
| 984 AA | ARVILHIAKRRGYDDIKNSDDKEKGAILKAIKQNEEKLANYQSVGEYLYKEYFQKFKEN | |
| 114.9 kDa | SKEFTNVRNKKESYERCIAQSFLKDELKLIFKKQREFGFSFSKKFEEEVLSVAFYKRAL | |
| | KDFSHLVGNCSFFTDEKRAPKNSPLAFMFVALTRIINLLNNLKNTEGILYTKDDLNALL | |
| | NEVLKNGTLTYKQTKKLLGLSDDYEFKGEKGTYFIEFKKYKEFIKALGEHNLSQDDLNE | |
| | IAKDITLIKDEIKLKKALAKYDLNQNQIDSLSKLEFKDHLNISFKALKLVTPLMLEGKK | |
| | YDEACNELNLKVAINEDKKDFLPAFNETYYKDEVTNPVVLRAIKEYRKVLNALLKKYGK | |
| | VHKINIELAREVGKNHSQRAKIEKEQNENYKAKKDAELECEKLGLKINSKNILKLRLFK | |
| | EQKEFCAYSGEKIKISDLQDEKMLEIDHIYPYSRSFDDSYMNKVLVFTKQNQEKLNQTP | |
| | FEAFGNDSAKWQKIEVLAKNLPTKKQKRILDKNYKDKEQKNFKDRNLNDTRYIARLVLN | |
| | YTKDYLDFLPLSDDENTKLNDTQKGSKVHVEAKSGMLTSALRHTWGFSAKDRNNHLHHA | |
| | IDAVIIAYANNSIVKAFSDFKKEQESNSAELYAKKISELDYKNKRKFFEPFSGFRQKVL | |
| | DKIDEIFVSKPERKKPSGALHEETFRKEEEFYQSYGGKEGVLKALELGKIRKVNGKIVK | |
| | NGDMFRVDIFKHKKTNKFYAVPIYTMDFALKVLPNKAVARSKKGEIKDWILMDENYEFC | |
| | FSLYKDSLILIQTKDMQEPEFVYYNAFTSSTVSLIVSKHDNKFETLSKNQKILFKNANE | |
| | KEVIAKSIGIQNLKVFEKYIVSALGEVTKAEFRQREDFKK | |
| GeoCas 9 | MRYKIGLDIGITSVGWAVMNLDIPRIEDLGVRIFDRAENPQTGESLALPRRLARSARRR | SEQ ID NO: |
| G. | LRRRKHRLERIRRLVIREGILTKEELDKLFEEKHEIDVWQLRVEALDRKLNNDELARVL | 380 |
| stearothermo- | LHLAKRRGFKSNRKSERSNKENSTMLKHIEENRAILSSYRTVGEMIVKDPKFALHKRNK | |
| philus | GENYTNTIARDDLEREIRLIFSKQREFGNMSCTEEFENEYITIWASQRPVASKDDIEKK | |
| 1087 AA | VGFCTFEPKEKRAPKATYTFQSFIAWEHINKLRLISPSGARGLTDEERRLLYEQAFQKN | |
| 127 kDa | KITYHDIRTLLHLPDDTYFKGIVYDRGESRKQNENIRFLELDAYHQIRKAVDKVYGKGK | |
| | SSSFLPIDFDTFGYALTLFKDDADIHSYLRNEYEQNGKRMPNLANKVYDNELIEELLNL | |
| | SFTKFGHLSLKALRSILPYMEQGEVYSSACERAGYTFTGPKKKQKTMLLPNIPPIANPV | |
| | VMRALTQARKVVNAIIKKYGSPVSIHIELARDLSQTFDERRKTKKEQDENRKKNETAIR | |
| | QLMEYGLTLNPTGHDIVKFKLWSEQNGRCAYSLQPIEIERLLEPGYVEVDHVIPYSRSL | |
| | DDSYTNKVLVLTRENREKGNRIPAEYLGVGTERWQQFETFVLTNKQFSKKKRDRLLRLH | |
| | YDENEETEFKNRNLNDTRYISRFFANFIREHLKFAESDDKQKVYTVNGRVTAHLRSRWE | |
| | FNKNREESDLHHAVDAVIVACTTPSDIAKVTAFYQRREQNKELAKKTEPHFPQPWPHFA | |
| | DELRARLSKHPKESIKALNLGNYDDQKLESLQPVFVSRMPKRSVTGAAHQETLRRYVGI | |
| | DERSGKIQTVVKTKLSEIKLDASGHFPMYGKESDPRTYEAIRQRLLEHNNDPKKAFQEP | |
| | LYKPKKNGEPGPVIRTVKIIDTKNQVIPLNDGKTVAYNSNIVRVDVFEKDGKYYCVPVY | |
| | TMDIMKGILPNKAIEPNKPYSEWKEMTEDYTFRFSLYPNDLIRIELPREKTVKTAAGEE | |
| | INVKDVFVYYKTIDSANGGLELISHDHRFSLRGVGSRTLKRFEKYQVDVLGNIYKVRGE | |
| | KRVGLASSAHSKPGKTIRPLQSTRD | |
| LbCas12a | MSKLEKFTNCYSLSKTLRFKAIPVGKTQENIDNKRLLVEDEKRAEDYKGVKKLLDRYYL | SEQ ID NO: |
| L. bacterium | SFINDVLHSIKLKNLNNYISLFRKKTRTEKENKELENLEINLRKEIAKAFKGNEGYKSL | 381 |
| 1228 AA | FKKDIIETILPEFLDDKDEIALVNSFNGFTTAFTGFFDNRENMFSEEAKSTSIAFRCIN | |
| 143.9 kDa | ENLTRYISNMDIFEKVDAIFDKHEVQEIKEKILNSDYDVEDFFEGEFFNFVLTQEGIDV | |
| | YNAIIGGFVTESGEKIKGLNEYINLYNQKTKQKLPKFKPLYKQVLSDRESLSFYGEGYT | |
| | SDEEVLEVFRNTLNKNSEIFSSIKKLEKLFKNFDEYSSAGIFVKNGPAISTISKDIFGE | |
| | WNVIRDKWNAEYDDIHLKKKAVVTEKYEDDRRKSFKKIGSFSLEQLQEYADADLSVVEK | |
| | LKEIIIQKVDEIYKVYGSSEKLFDADFVLEKSLKKNDAVVAIMKDLLDSVKSFENYIKA | |
| | FFGEGKETNRDESFYGDFVLAYDILLKVDHIYDAIRNYVTQKPYSKDKFKLYFQNPQFM | |
| | GGWDKDKETDYRATILRYGSKYYLAIMDKKYAKCLQKIDKDDVNGNYEKINYKLLPGPN | |
| | KMLPKVFFSKKWMAYYNPSEDIQKIYKNGTFKKGDMFNLNDCHKLIDFFKDSISRYPKW | |
| | SNAYDFNFSETEKYKDIAGFYREVEEQGYKVSFESASKKEVDKLVEEGKLYMFQIYNKD | |
| | FSDKSHGTPNLHTMYFKLLFDENNHGQIRLSGGAELFMRRASLKKEELVVHPANSPIAN | |
| | KNPDNPKKTTTLSYDVYKDKRFSEDQYELHIPIAINKCPKNIFKINTEVRVLLKHDDNP | |
| | YVIGIDRGERNLLYIVVVDGKGNIVEQYSLNEIINNFNGIRIKTDYHSLLDKKEKERFE | |
| | ARQNWTSIENIKELKAGYISQVVHKICELVEKYDAVIALEDLNSGFKNSRVKVEKQVYQ | |
| | KFEKMLIDKLNYMVDKKSNPCATGGALKGYQITNKFESFKSMSTQNGFIFYIPAWLTSK | |
| | IDPSTGFVNLLKTKYTSIADSKKFISSFDRIMYVPEEDLFEFALDYKNFSRTDADYIKK | |
| | WKLYSYGNRIRIFRNPKKNNVFDWEEVCLTSAYKELFNKYGINYQQGDIRALLCEQSDK | |
| | AFYSSFMALMSLMLQMRNSITGRTDVDFLISPVKNSDGIFYDSRNYEAQENAILPKNAD | |
| | ANGAYNIARKVLWAIGQFKKAEDEKLDKVKIAISNKEWLEYAQTSVKH | |
| BhCas12b | MATRSFILKIEPNEEVKKGLWKTHEVLNHGIAYYMNILKLIRQEAIYEHHEQDPKNPKK | SEQ ID NO: |
| B. hisashii | VSKAEIQAELWDFVLKMQKCNSFTHEVDKDEVFNILRELYEELVPSSVEKKGEANQLSN | 382 |
| 1108 AA | KFLYPLVDPNSQSGKGTASSGRKPRWYNLKIAGDPSWEEEKKKWEEDKKKDPLAKILGK | |
| 130.4kDa | LAEYGLIPLFIPYTDSNEPIVKEIKWMEKSRNQSVRRLDKDMFIQALERFLSWESWNLK | |
| | VKEEYEKVEKEYKTLEERIKEDIQALKALEQYEKERQEQLLRDTLNTNEYRLSKRGLRG | |
| | WREIIQKWLKMDENEPSEKYLEVFKDYQRKHPREAGDYSVYEFLSKKENHFIWRNHPEY | |
| | PYLYATFCEIDKKKKDAKQQATFTLADPINHPLWVRFEERSGSNLNKYRILTEQLHTEK | |
| | LKKKLTVQLDRLIYPTESGGWEEKGKVDIVLLPSRQFYNQIFLDIEEKGKHAFTYKDES | |
| | IKFPLKGTLGGARVQFDRDHLRRYPHKVESGNVGRIYFNMTVNIEPTESPVSKSLKIHR | |
| | DDFPKVVNFKPKELTEWIKDSKGKKLKSGIESLEIGLRVMSIDLGQRQAAAASIFEVVD | |
| | QKPDIEGKLFFPIKGTELYAVHRASFNIKLPGETLVKSREVLRKAREDNLKLMNQKLNF | |
| | LRNVLHFQQFEDITEREKRVTKWISRQENSDVPLVYQDELIQIRELMYKPYKDWVAFLK | |
| | QLHKRLEVEIGKEVKHWRKSLSDGRKGLYGISLKNIDEIDRTRKFLLRWSLRPTEPGEV | |
| | RRLEPGQRFAIDQLNHLNALKEDRLKKMANTIIMHALGYCYDVRKKKWQAKNPACQIIL | |
| | FEDLSNYNPYEERSRFENSKLMKWSRREIPRQVALQGEIYGLQVGEVGAQFSSRFHAKT | |
| | GSPGIRCSVVTKEKLQDNRFFKNLQREGRLTLDKIAVLKEGDLYPDKGGEKFISLSKDR | |
| | KCVTTHADINAAQNLQKRFWTRTHGFYKVYCKAYQVDGQTVYIPESKDQKQKIIEEFGE | |
| | GYFILKDGVYEWVNAGKLKIKKGSSKQSSSELVDSDILKDSFDLASELKGEKLMLYRDP | |
| | SGNVFPSDKWMAAGVFFGKLERILISKLTNQYSISTIEDDSSKQSM | |

[0236] Additional exemplary Cas9 equivalent protein sequences can include the following:

| Description | Sequence | |
|---|---|---|
| AsCas12a | MTQFEGFTNLYQVSKTLRFELIPQGKTLKHIQEQGFIEEDKARNDHYKELKPIIDRIYKT | |
| (previously | YADQCLQLVQLDWENLSAAIDSYRKEKTEETRNALIEEQATYRNAIHDYFIGRTDNLTDA | |
| known as | INKRHAEIYKGLFKAELFNGKVLKQLGTVTTTEHENALLRSFDKFTTYFSGFYENRKNVF | |
| Cpf1) | SAEDISTAIPHRIVQDNFPKFKENCHIFTRLITAVPSLREHFENVKKAIGIFVSTSIEEV | |
| Acidaminococcus | FSFPFYNQLLTQTQIDLYNQLLGGISREAGTEKIKGLNEVLNLAIQKNDETAHIIASLPH | |
| sp. | RFIPLFKQILSDRNTLSFILEEFKSDEEVIQSFCKYKTLLRNENVLETAEALFNELNSID | |
| (strain | LTHIFISHKKLETISSALCDHWDTLRNALYERRISELTGKITKSAKEKVQRSLKHEDINL | |
| BV3L6) | QEIISAAGKELSEAFKQKTSEILSHAHAALDQPLPTTLKKQEEKEILKSQLDSLLGLYHL | |
| UniProtKB | LDWFAVDESNEVDPEFSARLTGIKLEMEPSLSFYNKARNYATKKPYSVEKFKLNFQMPTL | |
| U2UMQ6 | ASGWDVNKEKNNGAILFVKNGLYYLGIMPKQKGRYKALSFEPTEKTSEGFDKMYYDYFPD | |
| | AAKMIPKCSTQLKAVTAHFQTHTTPILLSNNFIEPLEITKEIYDLNNPEKEPKKFQTAYA | |
| | KKTGDQKGYREALCKWIDFTRDFLSKYTKTTSIDLSSLRPSSQYKDLGEYYAELNPLLYH | |
| | ISFQRIAEKEIMDAVETGKLYLFQIYNKDFAKGHHGKPNLHTLYWTGLFSPENLAKTSIK | |
| | LNGQAELFYRPKSRMKRMAHRLGEKMLNKKLKDQKTPIPDTLYQELYDYVNHRLSHDLSD | |
| | EARALLPNVITKEVSHEIIKDRRFTSDKFFFHVPITLNYQAANSPSKFNQRVNAYLKEHP | |
| | ETPIIGIDRGERNLIYITVIDSTGKILEQRSLNTIQQFDYQKKLDNREKERVAARQAWSV | |
| | VGTIKDLKQGYLSQVIHEIVDLMIHYQAVVVLENLNFGFKSKRTGIAEKAVYQQFEKMLI | |
| | DKLNCLVLKDYPAEKVGGVLNPYQLTDQFTSFAKMGTQSGFLFYVPAPYTSKIDPLTGFV | |
| | DPFVWKTIKNHESRKHFLEGFDFLHYDVKTGDFILHFKMNRNLSFQRGLPGFMPAWDIVF | |
| | EKNETQFDAKGTPFIAGKRIVPVIENHRFTGRYRDLYPANELIALLEEKGIVFRDGSNIL | |
| | PKLLENDDSHAIDTMVALIRSVLQMRNSNAATGEDYINSPVRDLNGVCFDSRFQNPEWPM | |
| | DADANGAYHIALKGQLLLNHLKESKDLKLQNGISNQDWLAYIQELRN (SEQ ID NO: 383) | |
| AsCas12a | MTQFEGFTNLYQVSKTLRFELIPQGKTLKHIQEQGFIEEDKARNDHYKELKPIIDRIYKT | |
| nickase | YADQCLQLVQLDWENLSAAIDSYRKEKTEETRNALIEEQATYRNAIHDYFIGRTDNLTDA | |
| (e.g., | INKRHAEIYKGLFKAELFNGKVLKQLGTVTTTEHENALLRSFDKFTTYFSGFYENRKNVF | |
| R1226A) | SAEDISTAIPHRIVQDNFPKFKENCHIFTRLITAVPSLREHFENVKKAIGIFVSTSIEEV | |
| | FSFPFYNQLLTQTQIDLYNQLLGGISREAGTEKIKGLNEVLNLAIQKNDETAHIIASLPH | |
| | RFIPLFKQILSDRNTLSFILEEFKSDEEVIQSFCKYKTLLRNENVLETAEALFNELNSID | |
| | LTHIFISHKKLETISSALCDHWDTLRNALYERRISELTGKITKSAKEKVQRSLKHEDINL | |
| | QEIISAAGKELSEAFKQKTSEILSHAHAALDQPLPTTLKKQEEKEILKSQLDSLLGLYHL | |
| | LDWFAVDESNEVDPEFSARLTGIKLEMEPSLSFYNKARNYATKKPYSVEKFKLNFQMPTL | |
| | ASGWDVNKEKNNGAILFVKNGLYYLGIMPKQKGRYKALSFEPTEKTSEGFDKMYYDYFPD | |
| | AAKMIPKCSTQLKAVTAHFQTHTTPILLSNNFIEPLEITKEIYDLNNPEKEPKKFQTAYA | |
| | KKTGDQKGYREALCKWIDFTRDFLSKYTKTTSIDLSSLRPSSQYKDLGEYYAELNPLLYH | |
| | ISFQRIAEKEIMDAVETGKLYLFQIYNKDFAKGHHGKPNLHTLYWTGLFSPENLAKTSIK | |
| | LNGQAELFYRPKSRMKRMAHRLGEKMLNKKLKDQKTPIPDTLYQELYDYVNHRLSHDLSD | |
| | EARALLPNVITKEVSHEIIKDRRFTSDKFFFHVPITLNYQAANSPSKFNQRVNAYLKEHP | |
| | ETPIIGIDRGERNLIYITVIDSTGKILEQRSLNTIQQFDYQKKLDNREKERVAARQAWSV | |
| | VGTIKDLKQGYLSQVIHEIVDLMIHYQAVVVLENLNFGFKSKRTGIAEKAVYQQFEKMLI | |
| | DKLNCLVLKDYPAEKVGGVLNPYQLTDQFTSFAKMGTQSGFLFYVPAPYTSKIDPLTGFV | |
| | DPFVWKTIKNHESRKHFLEGFDFLHYDVKTGDFILHFKMNRNLSFQRGLPGFMPAWDIVE | |
| | EKNETQFDAKGTPFIAGKRIVPVIENHRFTGRYRDLYPANELIALLEEKGIVFRDGSNIL | |
| | PKLLENDDSHAIDTMVALIRSVLQMANSNAATGEDYINSPVRDLNGVCFDSRFQNPEWPM | |
| | DADANGAYHIALKGQLLLNHLKESKDLKLQNGISNQDWLAYIQELRN (SEQ ID NO: 384) | |
| LbCas12a | 1 | MNYKTGLEDF IGKESLSKTL RNALIPTEST KIHMEEMGVI RDDELRAEKQ QELKEIMDDY |
| (previously | 61 | YRTFIEEKLG QIQGIQWNSL FQKMEETMED ISVRKDLDKI QNEKRKEICC YFTSDKRFKD |
| known as | 121 | LFNAKLITDI LPNFIKDNKE YTEEEKAEKE QTRVLFQRFA TAFTNYFNQR RNNFSEDNIS |
| Cpf1) | 181 | TAISFRIVNE NSEIHLQNMR AFQRIEQQYP EEVCGMEEEY KDMLQEWQMK HIYSVDFYDR |
| Lachnospiraceae | 241 | ELTQPGIEYY NGICGKINEH MNQFCQKNRI NKNDFRMKKL HKQILCKKSS YYEIPFRFES |
| bacterium | 301 | DQEVYDALNE FIKTMKKKEI IRRCVHLGQE CDDYDLGKIY ISSNKYEQIS NALYGSWDTI |
| GAM79 | 361 | RKCIKEEYMD ALPGKGEKKE EKAEAAAKKE EYRSIADIDK IISLYGSEMD RTISAKKCIT |
| Ref Seq. | 421 | EICDMAGQIS IDPLVCNSDI KLLQNKEKTT EIKTILDSFL HVYQWGQTFI VSDIIEKDSY |
| WP_119623382. | 481 | FYSELEDVLE DFEGITTLYN HVRSYVTQKP YSTVKFKLHF GSPTLANGWS QSKEYDNNAI |
| 1 | 541 | LLMRDQKFYL GIFNVRNKPD KQIIKGHEKE EKGDYKKMIY NLLPGPSKML PKVFITSRSG |
| | 601 | QETYKPSKHI LDGYNEKRHI KSSPKFDLGY CWDLIDYYKE CIHKHPDWKN YDFHFSDTKD |
| | 661 | YEDISGFYRE VEMQGYQIKW TYISADEIQK LDEKGQIFLF QIYNKDFSVH STGKDNLHTM |
| | 721 | YLKNLFSEEN LKDIVLKLNG EAELFFRKAS IKTPIVHKKG SVLVNRSYTQ TVGNKEIRVS |
| | 781 | IPEEYYTEIY NYLNHIGKGK LSSEAQRYLD EGKIKSFTAT KDIVKNYRYC CDHYFLHLPI |
| | 841 | TINFKAKSDV AVNERTLAYI AKKEDIHIIG IDRGERNLLY ISVVDVHGNI REQRSFNIVN |
| | 901 | GYDYQQKLKD REKSRDAARK NWEEIEKIKE LKEGYLSMVI HYIAQLVVKY NAVVAMEDLN |
| | 961 | YGFKTGRFKV ERQVYQKFET MLIEKLHYLV FKDREVCEEG GVLRGYQLTY IPESLKKVGK |
| | 1021 | QCGFIFYVPA GYTSKIDPTT GFVNLFSFKN LTNRESRQDF VGKFDEIRYD RDKKMFEFSF |
| | 1081 | DYNNYIKKGT ILASTKWKVY TNGTRLKRIV VNGKYTSQSM EVELTDAMEK MLQRAGIEYH |
| | 1141 | DGKDLKGQIV EKGIEAEIID IFRLTVQMRN SRSESEDREY DRLISPVLND KGEFFDTATA |
| | 1201 | DKTLPQDADA NGAYCIALKG LYEVKQIKEN WKENEQFPRN KLVQDNKTWF DFMQKKRYL |
| | | (SEQ ID NO: 385) |
| PcCas12a - | 1 | MAKNFEDFKR LYSLSKTLRF EAKPIGATLD NIVKSGLLDE DEHRAASYVK VKKLIDEYHK |
| previously | 61 | VFIDRVLDDG CLPLENKGNN NSLAEYYESY VSRAQDEDAK KKFKEIQQNL RSVIAKKLTE |
| known at Cpf1 | 121 | DKAYANLFGN KLIESYKDKE DKKKIIDSDL IQFINTAEST QLDSMSQDEA KELVKEFWGF |
| Prevotella | 181 | VTYFYGFFDN RKNMYTAEEK STGIAYRLVN ENLPKFIDNI EAFNRAITRP EIQENMGVLY |
| copri | 241 | SDFSEYLNVE SIQEMFQLDY YNMLLTQKQI DVYNAIIGGK TDDEHDVKIK GINEYINLYN |
| Ref Seq. | 301 | QQHKDDKLPK LKALFKQILS DRNAISWLPE EFNSDQEVLN AIKDCYERLA ENVLGDKVLK |
| WP_119227726. | 361 | SLLGSLADYS LDGIFIRNDL QLTDISQKMF GNWGVIQNAI MQNIKRVAPA RKHKESEEDY |
| 1 | 421 | EKRIAGIFKK ADSFSISYIN DCLNEADPNN AYFVENYFAT FGAVNTPTMQ RENLFALVQN |
| | 481 | AYTEVAALLH SDYPTVKHLA QDKANVSKIK ALLDAIKSLQ HFVKPLLGKG DESDKDERFY |
| | 541 | GELASLWAEL DTVTPLYNMI RNYMTRKPYS QKKIKLNFEN PQLLGGWDAN KEKDYATIIL |
| | 601 | RRNGLYYLAI MDKDSRKLLG KAMPSDGECY EKMVYKFFKD VTTMIPKCST QLKDVQAYFK |
| | 661 | VNTDDYVLNS KAFNKPLTIT KEVFDLNNVL YGKYKKFQKG YLTATGDNVG YTHAVNVWIK |
| | 721 | FCMDFLNSYD STCIYDFSSL KPESYLSLDA FYQDANLLLY KLSFARASVS YINQLVEEGK |
| | 781 | MYLFQIYNKD FSEYSKGTPN MHTLYWKALF DERNLADVVY KLNGQAEMFY RKKSIENTHP |
| | 841 | THPANHPILN KNKDNKKKES LFDYDLIKDR RYTVDKFMFH VPITMNFKSV GSENINQDVK |
| | 901 | AYLRHADDMH IIGIDRGERH LLYLVVIDLQ GNIKEQYSLN EIVNEYNGNT YHTNYHDLLD |
| | 961 | VREEERLKAR QSWQTIENIK ELKEGYLSQV IHKITQLMVR YHAIVVLEDL SKGFMRSRQK |
| | 1021 | VEKQVYQKFE KMLIDKLNYL VDKKTDVSTP GGLLNAYQLT CKSDSSQKLG KQSGFLFYIP |
| | 1081 | AWNTSKIDPV TGFVNLLDTH SLNSKEKIKA FFSKFDAIRY NKDKKWFEFN LDYDKFGKKA |
| | 1141 | EDTRTKWTLC TRGMRIDTFR NKEKNSQWDN QEVDLTTEMK SLLEHYYIDI HGNLKDAISA |
| | 1201 | QTDKAFFTGL LHILKLTLQM RNSITGTETD YLVSPVADEN GIFYDSRSCG NQLPENADAN |
| | 1261 | GAYNIARKGL MLIEQIKNAE DLNNVKFDIS NKAWLNFAQQ KPYKNG |
| | | (SEQ ID NO: 386) |
| ErCas12a - | 1 | MFSAKLISDI LPEFVIHNNN YSASEKEEKT QVIKLFSRFA TSFKDYFKNR ANCFSANDIS |
| previously | 61 | SSSCHRIVND NAEIFFSNAL VYRRIVKNLS NDDINKISGD MKDSLKEMSL EEIYSYEKYG |
| known at Cpf1 | 121 | EFITQEGISF YNDICGKVNL FMNLYCQKNK ENKNLYKLRK LHKQILCIAD TSYEVPYKFE |
| Eubacterium | 181 | SDEEVYQSVN GFLDNISSKH IVERLRKIGE NYNGYNLDKI YIVSKFYESV SQKTYRDWET |
| rectale | 241 | INTALEIHYN NILPGNGKSK ADKVKKAVKN DLQKSITEIN ELVSNYKLCP DDNIKAETYI |
| Ref Seq. | 301 | HEISHILNNF EAQELKYNPE IHLVESELKA SELKNVLDVI MNAFHWCSVF MTEELVDKDN |
| WP119223642. | 361 | NFYAELEEIY DEIYPVISLY NLVRNYVTQK PYSTKKIKLN FGIPTLADGW SKSKEYSNNA |
| 1 | 421 | IILMRDNLYY LGIFNAKNKP DKKIIEGNTS ENKGDYKKMI YNLLPGPNKM IPKVFLSSKT |
| | 481 | GVETYKPSAY ILEGYKQNKH LKSSKDFDIT FCHDLIDYFK NCIAIHPEWK NFGFDFSDTS |
| | 541 | TYEDISGFYR EVELQGYKID WTYISEKDID LLQEKGQLYL FQIYNKDFSK KSSGNDNLHT |
| | 601 | MYLKNLFSEE NLKDIVLKLN GEAEIFFRKS SIKNPIIHKK GSILVNRTYE AEEKDQFGNI |
| | 661 | QIVRKTIPEN IYQELYKYFN DKSDKELSDE AAKLKNVVGH HEAATNIVKD YRYTYDKYFL |
| | 721 | HMPITINFKA NKTSFINDRI LQYIAKEKDL HVIGIDRGER NLIYVSVIDT CGNIVEQKSF |
| | 781 | NIVNGYDYQI KLKQQEGARQ IARKEWKEIG KIKEIKEGYL SLVIHEISKM VIKYNAIIAM |
| | 841 | EDLSYGFKKG RFKVERQVYQ KFETMLINKL NYLVFKDISI TENGGLLKGY QLTYIPDKLK |
| | 901 | NVGHQCGCIF YVPAAYTSKI DPTTGFVNIF KFKDLTVDAK REFIKKFDSI RYDSDKNLFC |
| | 961 | FTFDYNNFIT QNTVMSKSSW SVYTYGVRIK RRFVNGRFSN ESDTIDITKD MEKTLEMTDI |
| | 1021 | NWRDGHDLRQ DIIDYEIVQH IFEIFKLTVQ MRNSLSELED RDYDRLISPV LNENNIFYDS |
| | 1081 | AKAGDALPKD ADANGAYCIA LKGLYEIKQI TENWKEDGKF SRDKLKISNK DWFDFIQNKR |
| | 1141 | YL (SEQ ID NO: 387) |
| CsCas12a - | 1 | MNYKTGLEDF IGKESLSKTL RNALIPTEST KIHMEEMGVI RDDELRAEKQ QELKEIMDDY |
| previously | 61 | YRAFIEEKLG QIQGIQWNSL FQKMEETMED ISVRKDLDKI QNEKRKEICC YFTSDKRFKD |
| known at Cpf1 | 121 | LFNAKLITDI LPNFIKDNKE YTEEEKAEKE QTRVLFQRFA TAFTNYFNQR RNNFSEDNIS |
| Clostridium | 181 | TAISFRIVNE NSEIHLQNMR AFQRIEQQYP EEVCGMEEEY KDMLQEWQMK HIYLVDFYDR |
| sp. AF34-10BH | 241 | VLTQPGIEYY NGICGKINEH MNQFCQKNRI NKNDFRMKKL HKQILCKKSS YYEIPFRFES |
| Ref Seq. | 301 | DQEVYDALNE FIKTMKEKEI ICRCVHLGQK CDDYDLGKIY ISSNKYEQIS NALYGSWDTI |
| WP_118538418. | 361 | RKCIKEEYMD ALPGKGEKKE EKAEAAAKKE EYRSIADIDK IISLYGSEMD RTISAKKCIT |
| 1 | 421 | EICDMAGQIS TDPLVCNSDI KLLQNKEKTT EIKTILDSFL HVYQWGQTFI VSDIIEKDSY |
| | 481 | FYSELEDVLE DFEGITTLYN HVRSYVTQKP YSTVKFKLHF GSPTLANGWS QSKEYDNNAI |
| | 541 | LLMRDQKFYL GIFNVRNKPD KQIIKGHEKE EKGDYKKMIY NLLPGPSKML PKVFITSRSG |
| | 601 | QETYKPSKHI LDGYNEKRHI KSSPKFDLGY CWDLIDYYKE CIHKHPDWKN YDFHFSDTKD |
| | 661 | YEDISGFYRE VEMQGYQIKW TYISADEIQK LDEKGQIFLF QIYNKDFSVH STGKDNLHTM |
| | 721 | YLKNLFSEEN LKDIVLKLNG EAELFFRKAS IKTPVVHKKG SVLVNRSYTQ TVGDKEIRVS |
| | 781 | IPEEYYTEIY NYLNHIGRGK LSTEAQRYLE ERKIKSFTAT KDIVKNYRYC CDHYFLHLPI |
| | 841 | TINFKAKSDI AVNERTLAYI AKKEDIHIIG IDRGERNLLY ISVVDVHGNI REQRSFNIVN |
| | 901 | GYDYQQKLKD REKSRDAARK NWEEIEKIKE LKEGYLSMVI HYIAQLVVKY NAVVAMEDLN |
| | 961 | YGFKTGRFKV ERQVYQKFET MLIEKLHYLV FKDREVCEEG GVLRGYQLTY IPESLKKVGK |
| | 1021 | QCGFIFYVPA GYTSKIDPTT GFVNLFSFKN LTNRESRQDF VGKFDEIRYD RDKKMFEFSF |
| | 1081 | DYNNYIKKGT MLASTKWKVY TNGTRLKRIV VNGKYTSQSM EVELTDAMEK MLQRAGIEYH |
| | 1141 | DGKDLKGQIV EKGIEAEIID IFRLTVQMRN SRSESEDREY DRLISPVLND KGEFFDTATA |
| | 1201 | DKTLPQDADA NGAYCIALKG LYEVKQIKEN WKENEQFPRN KLVQDNKTWF DFMQKKRYL |
| | | (SEQ ID NO: 388) |
| BhCas12b | 1 | MATRSFILKI EPNEEVKKGL WKTHEVLNHG IAYYMNILKL IRQEAIYEHH EQDPKNPKKV |
| Bacillus | 61 | SKAEIQAELW DFVLKMQKCN SFTHEVDKDE VFNILRELYE ELVPSSVEKK GEANQLSNKF |
| hisashii | 121 | LYPLVDPNSQ SGKGTASSGR KPRWYNLKIA GDPSWEEEKK KWEEDKKKDP LAKILGKLAE |
| Ref Seq. | 181 | YGLIPLFIPY TDSNEPIVKE IKWMEKSRNQ SVRRLDKDMF IQALERFLSW ESWNLKVKEE |
| WP_095142515. | 241 | YEKVEKEYKT LEERIKEDIQ ALKALEQYEK ERQEQLLRDT LNTNEYRLSK RGLRGWREII |
| 1 | 301 | QKWLKMDENE PSEKYLEVFK DYQRKHPREA GDYSVYEFLS KKENHFIWRN HPEYPYLYAT |
| | 361 | FCEIDKKKKD AKQQATFTLA DPINHPLWVR FEERSGSNLN KYRILTEQLH TEKLKKKLTV |
| | 421 | QLDRLIYPTE SGGWEEKGKV DIVLLPSRQF YNQIFLDIEE KGKHAFTYKD ESIKFPLKGT |
| | 481 | LGGARVQFDR DHLRRYPHKV ESGNVGRIYF NMTVNIEPTE SPVSKSLKIH RDDFPKVVNF |
| | 541 | KPKELTEWIK DSKGKKLKSG IESLEIGLRV MSIDLGQRQA AAASIFEVVD QKPDIEGKLF |
| | 601 | FPIKGTELYA VHRASFNIKL PGETLVKSRE VLRKAREDNL KLMNQKLNFL RNVLHFQQFE |
| | 661 | DITEREKRVT KWISRQENSD VPLVYQDELI QIRELMYKPY KDWVAFLKQL HKRLEVEIGK |
| | 721 | EVKHWRKSLS DGRKGLYGIS LKNIDEIDRT RKFLLRWSLR PTEPGEVRRL EPGQRFAIDQ |
| | 781 | LNHLNALKED RLKKMANTII MHALGYCYDV RKKKWQAKNP ACQIILFEDL SNYNPYEERS |
| | 841 | RFENSKLMKW SRREIPRQVA LQGEIYGLQV GEVGAQFSSR FHAKTGSPGI RCSVVTKEKL |
| | 901 | QDNRFFKNLQ REGRLTLDKI AVLKEGDLYP DKGGEKFISL SKDRKCVTTH ADINAAQNLQ |
| | 961 | KRFWTRTHGF YKVYCKAYQV DGQTVYIPES KDQKQKIIEE FGEGYFILKD GVYEWVNAGK |
| | 1021 | LKIKKGSSKQ SSSELVDSDI LKDSFDLASE LKGEKLMLYR DPSGNVFPSD KWMAAGVFFG |
| | 1081 | KLERILISKL TNQYSISTIE DDSSKQSM (SEQ ID NO: 389) |
| ThCas12b | 1 | MSEKTTQRAY TLRLNRASGE CAVCQNNSCD CWHDALWATH KAVNRGAKAF GDWLLTLRGG |
| Thermomonas | 61 | LCHTLVEMEV PAKGNNPPQR PTDQERRDRR VLLALSWLSV EDEHGAPKEF IVATGRDSAD |
| hydrothermalis | 121 | DRAKKVEEKL REILEKRDFQ EHEIDAWLQD CGPSLKAHIR EDAVWVNRRA LFDAAVERIK |
| Ref Seq. | 181 | TLTWEEAWDF LEPFFGTQYF AGIGDGKDKD DAEGPARQGE KAKDLVQKAG QWLSARFGIG |
| WP_072754838 | 241 | TGADFMSMAE AYEKIAKWAS QAQNGDNGKA TIEKLACALR PSEPPTLDTV LKCISGPGHK |
| | 301 | SATREYLKTL DKKSTVTQED LNQLRKLADE DARNCRKKVG KKGKKPWADE VLKDVENSCE |
| | 361 | LTYLQDNSPA RHREFSVMLD HAARRVSMAH SWIKKAEQRR RQFESDAQKL KNLQERAPSA |
| | 421 | VEWLDRFCES RSMTTGANTG SGYRIRKRAI EGWSYVVQAW AEASCDTEDK RIAAARKVQA |
| | 481 | DPEIEKFGDI QLFEALAADE AICVWRDQEG TQNPSILIDY VTGKTAEHNQ KRFKVPAYRH |
| | 541 | PDELRHPVFC DFGNSRWSIQ FAIHKEIRDR DKGAKQDTRQ LQNRHGLKMR LWNGRSMTDV |
| | 601 | NLHWSSKRLT ADLALDQNPN PNPTEVTRAD RLGRAASSAF DHVKIKNVFN EKEWNGRLQA |
| | 661 | PRAELDRIAK LEEQGKTEQA EKLRKRLRWY VSFSPCLSPS GPFIVYAGQH NIQPKRSGQY |
| | 721 | APHAQANKGR ARLAQLILSR LPDLRILSVD LGHRFAAACA VWETLSSDAF RREIQGLNVL |
| | 781 | AGGSGEGDLF LHVEMTGDDG KRRTVVYRRI GPDQLLDNTP HPAPWARLDR QFLIKLQGED |
| | 841 | EGVREASNEE LWTVHKLEVE VGRTVPLIDR MVRSGFGKTE KQKERLKKLR ELGWISAMPN |
| | 901 | EPSAETDEKE GEIRSISRSV DELMSSALGT LRLALKRHGN RARIAFAMTA DYKPMPGGQK |
| | 961 | YYFHEAKEAS KNDDETKRRD NQIEFLQDAL SLWHDLFSSP DWEDNEAKKL WQNHIATLPN |
| | 1021 | YQTPEEISAE LKRVERNKKR KENRDKLRTA AKALAENDQL RQHLHDTWKE RWESDDQQWK |
| | 1081 | ERLRSLKDWI FPRGKAEDNP SIRHVGGLSI TRINTISGLY QILKAFKMRP EPDDLRKNIP |
| | 1141 | QKGDDELENF NRRLLEARDR LREQRVKQLA SRIIEAALGV GRIKIPKNGK LPKRPRTTVD |
| | 1201 | TPCHAVVIES LKTYRPDDLR TRRENRQLMQ WSSAKVRKYL KEGCELYGLH FLEVPANYTS |
| | 1261 | RQCSRTGLPG IRCDDVPTGD FLKAPWWRRA INTAREKNGG DAKDRFLVDL YDHLNNLQSK |
| | 1321 | GEALPATVRV PRQGGNLFIA GAQLDDTNKE RRAIQADLNA AANIGLRALL DPDWRGRWWY |
| | 1381 | VPCKDGTSEP ALDRIEGSTA FNDVRSLPTG DNSSRRAPRE IENLWRDPSG DSLESGTWSP |
| | 1441 | TRAYWDTVQS RVIELLRRHA GLPTS (SEQ ID NO: 390) |
| LsCas12b | 1 | MSIRSFKLKL KTKSGVNAEQ LRRGLWRTHQ LINDGIAYYM NWLVLLRQED LFIRNKETNE |
| Laceyella | 61 | IEKRSKEEIQ AVLLERVHKQ QQRNQWSGEV DEQTLLQALR QLYEEIVPSV IGKSGNASLK |
| sacchari | 121 | ARFFLGPLVD PNNKTTKDVS KSGPTPKWKK MKDAGDPNWV QEYEKYMAER QTLVRLEEMG |
| WP_132221894. | 181 | LIPLFPMYTD EVGDIHWLPQ ASGYTRTWDR DMFQQAIERL LSWESWNRRV RERRAQFEKK |
| 1 | 241 | THDFASRFSE SDVQWMNKLR EYEAQQEKSL EENAFAPNEP YALTKKALRG WERVYHSWMR |
| | 301 | LDSAASEEAY WQEVATCQTA MRGEFGDPAI YQFLAQKENH DIWRGYPERV IDFAELNHLQ |
| | 361 | RELRRAKEDA TFTLPDSVDH PLWVRYEAPG GTNIHGYDLV QDTKRNLTLI LDKFILPDEN |
| | 421 | GSWHEVKKVP FSLAKSKQFH RQVWLQEEQK QKKREVVFYD YSTNLPHLGT LAGAKLQWDR |
| | 481 | NFLNKRTQQQ IEETGEIGKV FFNISVDVRP AVEVKNGRLQ NGLGKALTVL THPDGTKIVT |
| | 541 | GWKAEQLEKW VGESGRVSSL GLDSLSEGLR VMSIDLGQRT SATVSVFEIT KEAPDNPYKF |
| | 601 | FYQLEGTEMF AVHQRSFLLA LPGENPPQKI KQMREIRWKE RNRIKQQVDQ LSAILRLHKK |
| | 661 | VNEDERIQAI DKLLQKVASW QLNEEIATAW NQALSQLYSK AKENDLQWNQ AIKNAHHQLE |
| | 721 | PVVGKQISLW RKDLSTGRQG IAGLSLWSIE ELEATKKLLT RWSKRSREPG VVKRIERFET |
| | 781 | FAKQIQHHIN QVKENRLKQL ANLIVMTALG YKYDQEQKKW IEVYPACQVV LFENLRSYRF |
| | 841 | SFERSRRENK KLMEWSHRSI PKLVQMQGEL FGLQVADVYA AYSSRYHGRT GAPGIRCHAL |
| | 901 | TEADLRNETN IIHELIEAGF IKEEHRPYLQ QGDLVPWSGG ELFATLQKPY DNPRILTLHA |
| | 961 | DINAAQNIQK RFWHPSMWFR VNCESVMEGE IVTYVPKNKT VHKKQGKTFR FVKVEGSDVY |
| | 1021 | EWAKWSKNRN KNTFSSITER KPPSSMILFR DPSGTFFKEQ EWVEQKTFWG KVQSMIQAYM |
| | 1081 | KKTIVQRMEE (SEQ ID NO: 391) |
| DtCas12b | 1 | MVLGRKDDTA ELRRALWTTH EHVNLAVAEV ERVLLRCRGR SYWTLDRRGD PVHVPESQVA |
| Dsulfonatronum | 61 | EDALAMAREA QRRNGWPVVG EDEEILLALR YLYEQIVPSC LLDDLGKPLK GDAQKIGTNY |
| thiodismutans | 121 | AGPLFDSDTC RRDEGKDVAC CGPFHEVAGK YLGALPEWAT PISKQEFDGK DASHLRFKAT |
| WP_031386437 | 181 | GGDDAFFRVS IEKANAWYED PANQDALKNK AYNKDDWKKE KDKGISSWAV KYIQKQLQLG |
| | 241 | QDPRTEVRRK LWLELGLLPL FIPVFDKTMV GNLWNRLAVR LALAHLLSWE SWNHRAVQDQ |
| | 301 | ALARAKRDEL AALFLGMEDG FAGLREYELR RNESIKQHAF EPVDRPYVVS GRALRSWTRV |
| | 361 | REEWLRHGDT QESRKNICNR LQDRLRGKFG DPDVFHWLAE DGQEALWKER DCVTSFSLLN |
| | 421 | DADGLLEKRK GYALMTFADA RLHPRWAMYE APGGSNLRTY QIRKTENGLW ADVVLLSPRN |
| | 481 | ESAAVEEKTE NVRLAPSGQL SNVSFDQIQK GSKMVGRCRY QSANQQFEGL LGGAEILFDR |
| | 541 | KRIANEQHGA TDLASKPGHV WFKLTLDVRP QAPQGWLDGK GRPALPPEAK HFKTALSNKS |
| | 601 | KFADQVRPGL RVLSVDLGVR SFAACSVFEL VRGGPDQGTY FPAADGRTVD DPEKLWAKHE |
| | 661 | RSFKITLPGE NPSRKEEIAR RAAMEELRSL NGDIRRLKAI LRLSVLQEDD PRTEHLRLFM |
| | 721 | EAIVDDPAKS ALNAELFKGF GDDRFRSTPD LWKQHCHFFH DKAEKVVAER FSRWRTETRP |
| | 781 | KSSSWQDWRE RRGYAGGKSY WAVTYLEAVR GLILRWNMRG RTYGEVNRQD KKQFGTVASA |
| | 841 | LLHHINQLKE DRIKTGADMI IQAARGFVPR KNGAGWVQVH EPCRLILFED LARYRFRTDR |
| | 901 | SRRENSRLMR WSHREIVNEV GMQGELYGLH VDTTEAGFSS RYLASSGAPG VRCRHLVEED |
| | 961 | FHDGLPGMHL VGELDWLLPK DKDRTANEAR RLLGGMVRPG MLVPWDGGEL FATLNAASQL |
| | 1021 | HVIHADINAA QNLQRRFWGR CGEAIRIVCN QLSVDGSTRY EMAKAPKARL LGALQQLKNG |
| | 1081 | DAPFHLTSIP NSQKPENSYV MTPTNAGKKY RAGPGEKSSG EEDELALDIV EQAEELAQGR |
| | 1141 | KTFFRDPSGV FFAPDRWLPS EIYWSRIRRR IWQVTLERNS SGRQERAEMD EMPY |
| | | (SEQ ID NO: 392) |

[0237] The adenine base editors described herein may also comprise Cas12a/Cpf1 (dCpf1) variants that may be used as a guide nucleotide sequence-programmable DNA-binding protein domain. The Cas12a/Cpf1 protein has a RuvC-like endonuclease domain that is similar to the RuvC domain of Cas9 but does not have a HNH endonuclease domain, and the N-terminal of Cpf1 does not have the alfa-helical recognition lobe of Cas9. It was shown in Zetsche et al., Cell, 163, 759-771, 2015 (which is incorporated herein by reference) that, the RuvC-like domain of Cpf1 is responsible for cleaving both DNA strands and inactivation of the RuvC-like domain inactivates Cpf1 nuclease activity.

[0238] G. napDNAbps that Recognize Non-Canonical PAM Sequences

[0239] In some embodiments, the napDNAbp is a nucleic acid programmable DNA binding protein that does not require a canonical (NGG) PAM sequence. In some embodiments, the napDNAbp is an argonaute protein. One example of such a nucleic acid programmable DNA binding protein is an Argonaute protein from Natronobacterium gregoryi (NgAgo). NgAgo is a ssDNA-guided endonuclease. NgAgo binds 5′ phosphorylated ssDNA of ˜24 nucleotides (gDNA) to guide it to its target site and will make DNA double-strand breaks at the gDNA site. In contrast to Cas9, the NgAgo-gDNA system does not require a protospacer-adjacent motif (PAM). Using a nuclease inactive NgAgo (dNgAgo) can greatly expand the bases that may be targeted. The characterization and use of NgAgo have been described in Gao et al., Nat Biotechnol., 2016 July; 34(7):768-73. PubMed PMID: 27136078; Swarts et al., Nature. 507(7491) (2014):258-61; and Swarts et al., Nucleic Acids Res. 43(10) (2015):5120-9, each of which is incorporated herein by reference.

[0240] In some embodiments, the disclosure provides napDNAbp domains that comprise SpCas9 variants that recognize and work best with NRRH, NRCH, and NRTH PAMs. See International Application No. PCT/US2019/47996, which published as International Publication No. WO 2020/041751 on Feb. 27, 2020, incorporated by reference herein. In some embodiments, the disclosed base editors comprise a napDNAbp domain selected from SpCas9-NRRH, SpCas9-NRTH, and SpCas9-NRCH.

[0241] In some embodiments, the disclosed base editors comprise a napDNAbp domain that has a sequence that is at least 90%, at least 95%, at least 98%, or at least 99% identical to SpCas9-NRRH. In some embodiments, the disclosed base editors comprise a napDNAbp domain that comprises SpCas9-NRRH. The SpCas9-NRRH has an amino acid sequence as presented in SEQ ID NO: 435 (underlined residues are mutated relative to SpCas9, as set forth in SEQ ID NO: 326)

(SEQ ID NO: 435)
MDKKYSIGLDIGTNSVGWAVITDEYKVPSKKFKVLGNTDRHSIKKNLIGA
LLFDSGETAEATRLKRTARRRYTRRKNRICYLQEIFSNEMAKVDDSFFHR
LEESFLVEEDKKHERHPIFGNIVDEVAYHEKYPTIYHLRKKLVDSTDKAD
LRLIYLALAHMIKFRGHFLIEGDLNPDNSDVDKLFIQLVQTYNQLFEENP
INASGVDAKAILSARLSKSRRLENLIAQLPGEKKNGLFGNLIALSLGLTP
NFKSNFDLAEDAKLQLSKDTYDDDLDNLLAQIGDQYADLFLAAKNLSDAI
LLSDILRVNTEITKAPLSASMVKRYDEHHQDLTLLKALVRQQLPEKYKEI
FFDQSKNGYAGYIDGGASQEEFYKFIKPILEKMDGTEELLVKLNREDLLR
KQRTFDNGIIPHQIHLGELHAILRRQGDFYPFLKDNREKIEKILTFRIPY
YVGPLARGNSRFAWMTRKSEETITPWNFEEVVDKGASAQSFIERMTNFDK
NLPNEKVLPKHSLLYEYFTVYNELTKVKYVTEGMRKPAFLSGEQKKAIVD
LLFKTNRKVTVKQLKEDYFKKIECFDSVEISGVEDRFNASLGTYHDLLKI
IKDKDFLDNEENEDILEDIVLTLTLFEDREMIEERLKTYAHLFDDKVMKQ
LKRLRYTGWGRLSRKLINGIRDKQSGKTILDFLKSDGFANRNFMQLIHDD
SLTFKEDIQKAQVSGQGDSLHEHIANLAGSPAIKKGILQTVKVVDELVKV
MGGHKPENIVIEMARENQTTQKGQKNSRERMKRIEEGIKELGSQILKEHP
VENTQLQNEKLYLYYLQNGRDMYVDQELDINRLSDYDVDHIVPQSFLKDD
SIDNKVLTRSDKNRGKSDNVPSEEVVKKMKNYWRQLLNAKLITQRKFDNL
TKAERGGLSELDKAGFIKRQLVETRQITKHVAQILDSRMNTKYDENDKLI
REVKVITLKSKLVSDFRKDFQFYKVREINNYHHAHDAYLNAVVGTALIKK
YPKLESEFVYGDYKVYDVRKMIAKSEQEIGKATAKYFFYSNIMNFFKTEI
TLANGEIRKRPLIETNGETGEIVWDKGRDFATVRKVLSMPQVNIVKKTEV
QTGGFSKESILPKGNSDKLIARKKDWDPKKYGGFNSPTAAYSVLVVAKVE
KGKSKKLKSVKELLGITIMERSSFEKNPIGFLEAKGYKEVKKDLIIKLPK
YSLFELENGRKRMLASAGVLHKGNELALPSKYVNFLYLASHYEKLKGSPE
DNEQKQLFVEQHKHYLDEIIEQISEFSKRVILADANLDKVLSAYNKHRDK
PIREQAENIIHLFTLTNLGVPAAFKYFDTTIDKKRYTSTKEVLDATLIHQ
SITGLYETRIDLSQLGGD.

[0242] In some embodiments, the disclosed base editors comprise a napDNAbp domain that has a sequence that is at least 90%, at least 95%, at least 98%, or at least 99% identical to SpCas9-NRCH. In some embodiments, the disclosed base editors comprise a napDNAbp domain that comprises SpCas9-NRCH. An example of an NRCH PAM is CACC (5′-CACC-3′). The SpCas9-NRCH has an amino acid sequence as presented in SEQ ID NO: 436 (underlined residues are mutated relative to SpCas9)

(SEQ ID NO: 436)
MDKKYSIGLDIGTNSVGWAVITDEYKVPSKKFKVLGNTDRHSIKKNLIGA
LLFDSGETAEATRLKRTARRRYTRRKNRICYLQEIFSNEMAKVDDSFFHR
LEESFLVEEDKKHERHPIFGNIVDEVAYHEKYPTIYHLRKKLVDSTDKAD
LRLIYLALAHMIKFRGHFLIEGDLNPDNSDVDKLFIQLVQTYNQLFEENP
INASGVDAKAILSARLSKSRRLENLIAQLPGEKKNGLFGNLIALSLGLTP
NFKSNFDLAEDAKLQLSKDTYDDDLDNLLAQIGDQYADLFLAAKNLSDAI
LLSDILRVNTEITKAPLSASMVKRYDEHHQDLTLLKALVRQQLPEKYKEI
FFDQSKNGYAGYIDGGASQEEFYKFIKPILEKMDGTEELLVKLNREDLLR
KQRTFDNGIIPHQIHLGELHAILRRQGDFYPFLKDNREKIEKILTFRIPY
YVGPLARGNSRFAWMTRKSEETITPWNFEEVVDKGASAQSFIERMTNFDK
NLPNEKVLPKHSLLYEYFTVYNELTKVKYVTEGMRKPAFLSGEQKKAIVD
LLFKTNRKVTVKQLKEDYFKKIECFDSVEISGVEDRFNASLGTYHDLLKI
IKDKDFLDNEENEDILEDIVLTLTLFEDREMIEERLKTYAHLFDDKVMKQ
LKRLRYTGWGRLSRKLINGIRDKQSGKTILDFLKSDGFANRNFMQLIHDD
SLTFKEDIQKAQVSGQGDSLHEHIANLAGSPAIKKGILQTVKVVDELVKV
MGGHKPENIVIEMARENQTTQKGQKNSRERMKRIEEGIKELGSQILKEHP
VENTQLQNEKLYLYYLQNGRDMYVDQELDINRLSDYDVDHIVPQSFLKDD
SIDNKVLTRSDKNRGKSDNVPSEEVVKKMKNYWRQLLNAKLITQRKFDNL
TKAERGGLSELDKAGFIKRQLVETRQITKHVAQILDSRMNTKYDENDKLI
REVKVITLKSKLVSDFRKDFQFYKVREINNYHHAHDAYLNAVVGTALIKK
YPKLESEFVYGDYKVYDVRKMIAKSEQEIGKATAKYFFYSNIMNFFKTEI
TLANGEIRKRPLIETNGETGEIVWDKGRDFATVRKVLSMPQVNIVKKTEV
QTGGFSKESILPKGNSDKLIARKKDWDPKKYGGFNSPTVAYSVLVVAKVE
KGKSKKLKSVKELLGITIMERSSFEKNPIDFLEAKGYKEVKKDLIIKLPK
YSLFELENGRKRMLASAGVLQKGNELALPSKYVNFLYLASHYEKLKGSPE
DNEQKQLFVEQHKHYLDEIIEQISEFSKRVILADANLDKVLSAYNKHRDK
PIREQAENIIHLFTLTNLGAPAAFKYFDTTINRKQYNTTKEVLDATLIRQ
SITGLYETRIDLSQLGGD

[0243] In some embodiments, the disclosed base editors comprise a napDNAbp domain that has a sequence that is at least 90%, at least 95%, at least 98%, or at least 99% identical to SpCas9-NRTH. In some embodiments, the disclosed base editors comprise a napDNAbp domain that comprises SpCas9-NRTH. The SpCas9-NRTH has an amino acid sequence as presented in SEQ ID NO: 437 (underlined residues are mutated relative to SpCas9)

(SEQ ID NO: 437)
MDKKYSIGLDIGTNSVGWAVITDEYKVPSKKFKVLGNTDRHSIKKNLIGA
LLFDSGETAEATRLKRTARRRYTRRKNRICYLQEIFSNEMAKVDDSFFHR
LEESFLVEEDKKHERHPIFGNIVDEVAYHEKYPTIYHLRKKLVDSTDKAD
LRLIYLALAHMIKFRGHFLIEGDLNPDNSDVDKLFIQLVQTYNQLFEENP
INASGVDAKAILSARLSKSRRLENLIAQLPGEKKNGLFGNLIALSLGLTP
NFKSNFDLAEDAKLQLSKDTYDDDLDNLLAQIGDQYADLFLAAKNLSDAI
LLSDILRVNTEITKAPLSASMVKRYDEHHQDLTLLKALVRQQLPEKYKEI
FFDQSKNGYAGYIDGGASQEEFYKFIKPILEKMDGTEELLVKLNREDLLR
KQRTFDNGIIPHQIHLGELHAILRRQGDFYPFLKDNREKIEKILTFRIPY
YVGPLARGNSRFAWMTRKSEETITPWNFEEVVDKGASAQSFIERMTNFDK
NLPNEKVLPKHSLLYEYFTVYNELTKVKYVTEGMRKPAFLSGEQKKAIVD
LLFKTNRKVTVKQLKEDYFKKIECFDSVEISGVEDRFNASLGTYHDLLKI
IKDKDFLDNEENEDILEDIVLTLTLFEDREMIEERLKTYAHLFDDKVMKQ
LKRLRYTGWGRLSRKLINGIRDKQSGKTILDFLKSDGFANRNFMQLIHDD
SLTFKEDIQKAQVSGQGDSLHEHIANLAGSPAIKKGILQTVKVVDELVKV
MGGHKPENIVIEMARENQTTQKGQKNSRERMKRIEEGIKELGSQILKEHP
VENTQLQNEKLYLYYLQNGRDMYVDQELDINRLSDYDVDHIVPQSFLKDD
SIDNKVLTRSDKNRGKSDNVPSEEVVKKMKNYWRQLLNAKLITQRKFDNL
TKAERGGLSELDKAGFIKRQLVETRQITKHVAQILDSRMNTKYDENDKLI
REVKVITLKSKLVSDFRKDFQFYKVREINNYHHAHDAYLNAVVGTALIKK
YPKLESEFVYGDYKVYDVRKMIAKSEQEIGKATAKYFFYSNIMNFFKTEI
TLANGEIRKRPLIETNGETGEIVWDKGRDFATVRKVLSMPQVNIVKKTEV
QTGGFSKESILPKGNSDKLIARKKDWDPKKYGGFNSPTVAYSVLVVAKVE
KGKSKKLKSVKELLGITIMERSSFEKNPIGFLEAKGYKEVKKDLIIKLPK
YSLFELENGRKRMLASASVLHKGNELALPSKYVNFLYLASHYEKLKGSSE
DNKQKQLFVEQHKHYLDEIIEQISEFSKRVILADANLDKVLSAYNKHRDK
PIREQAENIIHLFTLTNLGASAAFKYFDTTIGRKLYTSTKEVLDATLIHQ
SITGLYETRIDLSQLGGD

[0244] In other embodiments, the napDNAbp of any of the disclosed base editors comprises a Cas9 derived from a Streptococcus macacae, e.g. Streptococcus macacae NCTC 11558, or SmacCas9, or a variant thereof. In some embodiments, the napDNAbp comprises a hybrid variant of SmacCas9 that incorporates an SpCas9 domain with the SmacCas9 domain and is known as Spy-macCas9, or a variant thereof. In some embodiments, the napDNAbp comprises a hybrid variant of SmacCas9 that incorporates an increased nucleolytic variant of an SpCas9 (iSpy Cas9) domain and is known as iSpy-macCas9. Relative to Spymac-Cas9, iSpyMac-Cas9 contains two mutations, R221K and N394K, that were identified by deep mutational scans of Spy Cas9 that raise modification rates of the protein on most targets. See Jakimo et al., bioRxiv, A Cas9 with Complete PAM Recognition for Adenine Dinucleotides (September 2018), herein incorporated by reference. Jakimo et al. showed that the hybrids Spy-macCas9 and iSpy-macCas9 recognize a short 5′-NAA-3′ PAM and recognized all evaluated adenine dinucleotide PAM sequences and possesses robust editing efficiency in human cells. Liu et al. engineered base editors containing Spy-mac Cas9, and demonstrated that cytidine and adenine base editors containing Spymac domains can induce efficient C-to-T and A-to-G conversions in vivo. In addition, Liu et al. suggested that the PAM scope of Spy-mac Cas9 may be 5′-TAAA-3′, rather than 5′-NAA-3′ as reported by Jakimo et al (see Liu et al. Cell Discovery (2019) 5:58, herein incorporated by reference).

[0245] In some embodiments, the disclosed base editors comprise a napDNAbp domain that has a sequence that is at least 90%, at least 95%, at least 98%, or at least 99% identical to iSpyMac-Cas9. In some embodiments, the disclosed base editors comprise a napDNAbp domain that comprises iSpyMac-Cas9 (or SpyMac-Cas9). The iSpyMac-Cas9 has an amino acid sequence as presented in SEQ ID NO: 439 (R221K and N394K mutations are underlined):

(SEQ ID NO: 439)
DKKYSIGLDIGTNSVGWAVITDEYKVPSKKFKVLGNTDRHSIKKNLIGA
LLFDSGETAEATRLKRTARRRYTRRKNRICYLQEIFSNEMAKVDDSFFH
RLEESFLVEEDKKHERHPIFGNIVDEVAYHEKYPTIYHLRKKLVDSTDK
ADLRLIYLALAHMIKFRGHFLIEGDLNPDNSDVDKLFIQLVQTYNQLFE
ENPINASGVDAKAILSARLSKSRKLENLIAQLPGEKKNGLFGNLIALSL
GLTPNFKSNFDLAEDAKLQLSKDTYDDDLDNLLAQIGDQYADLFLAAKN
LSDAILLSDILRVNTEITKAPLSASMIKRYDEHHQDLTLLKALVRQQLP
EKYKEIFFDQSKNGYAGYIDGGASQEEFYKFIKPILEKMDGTEELLVKL
KREDLLRKQRTFDNGSIPHQIHLGELHAILRRQEDFYPFLKDNREKIEK
ILTFRIPYYVGPLARGNSRFAWMTRKSEETITPWNFEEVVDKGASAQSF
IERMTNFDKNLPNEKVLPKHSLLYEYFTVYNELTKVKYVTEGMRKPAFL
SGEQKKAIVDLLFKTNRKVTVKQLKEDYFKKIECFDSVEISGVEDRFNA
SLGTYHDLLKIIKDKDFLDNEENEDILEDIVLTLTLFEDREMIEERLKT
YAHLFDDKVMKQLKRRRYTGWGRLSRKLINGIRDKQSGKTILDFLKSDG
FANRNFMQLIHDDSLTFKEDIQKAQVSGQGDSLHEHIANLAGSPAIKKG
ILQTVKVVDELVKVMGRHKPENIVIEMARENQTTQKGQKNSRERMKRIE
EGIKELGSQILKEHPVENTQLQNEKLYLYYLQNGRDMYVDQELDINRLS
DYDVDHIVPQSFLKDDSIDNKVLTRSDKNRGKSDNVPSEEVVKKMKNYW
RQLLNAKLITQRKFDNLTKAERGGLSELDKAGFIKRQLVETRQITKHVA
QILDSRMNTKYDENDKLIREVKVITLKSKLVSDFRKDFQFYKVREINNY
HHAHDAYLNAVVGTALIKKYPKLESEFVYGDYKVYDVRKMIAKSEQEIG
KATAKYFFYSNIMNFFKTEITLANGEIRKRPLIETNGETGEIVWDKGRD
FATVRKVLSMPQVNIVKKTEIQTVGQNGGLFDDNPKSPLEVTPSKLVPL
KKELNPKKYGGYQKPTTAYPVLLITDTKQLIPISVMNKKQFEQNPVKFL
RDRGYQQVGKNDFIKLPKYTLVDIGDGIKRLWASSKEIHKGNQLVVSKK
SQILLYHAHHLDSDLSNDYLQNHNQQFDVLFNEIISFSKKCKLGKEHIQ
KIENVYSNKKNSASIEELAESFIKLLGFTQLGATSPFNFLGVKLNQKQY
KGKKDYILPCTEGTLIRQSITGLYETRVDLSKIGED

[0246] In other embodiments, the napDNAbp of any of the disclosed base editors is a prokaryotic homolog of an Argonaute protein. Prokaryotic homologs of Argonaute proteins are known and have been described, for example, in Makarova K., et al., “Prokaryotic homologs of Argonaute proteins are predicted to function as key components of a novel system of defense against mobile genetic elements”, Biol Direct. 2009 Aug. 25; 4:29. doi: 10.1186/1745-6150-4-29, the entire contents of which is hereby incorporated by reference. In some embodiments, the napDNAbp is a Marinitoga piezophila Argunaute (MpAgo) protein. The CRISPR-associated Marinitoga piezophila Argunaute (MpAgo) protein cleaves single-stranded target sequences using 5′-phosphorylated guides. The 5′ guides are used by all known Argonautes. The crystal structure of an MpAgo-RNA complex shows a guide strand binding site comprising residues that block 5′ phosphate interactions. This data suggests the evolution of an Argonaute subclass with noncanonical specificity for a 5′-hydroxylated guide. See, e.g., Kaya et al., “A bacterial Argonaute with noncanonical guide RNA specificity”, Proc Natl Acad Sci USA. 2016 Apr. 12; 113(15):4057-62, the entire contents of which are hereby incorporated by reference). It should be appreciated that other argonaute proteins may be used, and are within the scope of this disclosure.

[0247] In some embodiments, the napDNAbp is a single effector of a microbial CRISPR-Cas system. Single effectors of microbial CRISPR-Cas systems include, without limitation, Cas9, Cpf1, C2c1, C2c2, and C2c3. Typically, microbial CRISPR-Cas systems are divided into Class 1 and Class 2 systems. Class 1 systems have multisubunit effector complexes, while Class 2 systems have a single protein effector. For example, Cas9 and Cpf1 are Class 2 effectors. In addition to Cas9 and Cpf1, three distinct Class 2 CRISPR-Cas systems (C2c1, C2c2, and C2c3) have been described by Shmakov et al., “Discovery and Functional Characterization of Diverse Class 2 CRISPR Cas Systems”, Mol. Cell, 2015 Nov. 5; 60(3): 385-397, the entire contents of which is hereby incorporated by reference. Effectors of two of the systems, C2c1 and C2c3, contain RuvC-like endonuclease domains related to Cpf1. A third system, C2c2 contains an effector with two predicated HEPN RNase domains. Production of mature CRISPR RNA is tracrRNA-independent, unlike production of CRISPR RNA by C2c1. C2c1 depends on both CRISPR RNA and tracrRNA for DNA cleavage. Bacterial C2c2 has been shown to possess a unique RNase activity for CRISPR RNA maturation distinct from its RNA-activated single-stranded RNA degradation activity. These RNase functions are different from each other and from the CRISPR RNA-processing behavior of Cpf1. See, e.g., East-Seletsky, et al., “Two distinct RNase activities of CRISPR-C2c2 enable guide-RNA processing and RNA detection”, Nature, 2016 Oct. 13; 538(7624):270-273, the entire contents of which are hereby incorporated by reference. In vitro biochemical analysis of C2c2 in Leptotrichia shahii has shown that C2c2 is guided by a single CRISPR RNA and can be programed to cleave ssRNA targets carrying complementary protospacers. Catalytic residues in the two conserved HEPN domains mediate cleavage. Mutations in the catalytic residues generate catalytically inactive RNA-binding proteins. See e.g., Abudayyeh et al., “C2c2 is a single-component programmable RNA-guided RNA-targeting CRISPR effector”, Science, 2016 Aug. 5; 353(6299), the entire contents of which are hereby incorporated by reference.

[0248] The crystal structure of Alicyclobaccillus acidoterrastris C2c1 (AacC2c1) has been reported in complex with a chimeric single-molecule guide RNA (sgRNA). See e.g., Liu et al., “C2c1-sgRNA Complex Structure Reveals RNA-Guided DNA Cleavage Mechanism”, Mol. Cell, 2017 Jan. 19; 65(2):310-322, the entire contents of which are hereby incorporated by reference. The crystal structure has also been reported in Alicyclobacillus acidoterrestris C2c1 bound to target DNAs as ternary complexes. See e.g., Yang et al., “PAM-dependent Target DNA Recognition and Cleavage by C2C1 CRISPR-Cas endonuclease”, Cell, 2016 Dec. 15; 167(7):1814-1828, the entire contents of which are hereby incorporated by reference. Catalytically competent conformations of AacC2c1, both with target and non-target DNA strands, have been captured independently positioned within a single RuvC catalytic pocket, with C2c1-mediated cleavage resulting in a staggered seven-nucleotide break of target DNA. Structural comparisons between C2c1 ternary complexes and previously identified Cas9 and Cpf1 counterparts demonstrate the diversity of mechanisms used by CRISPR-Cas9 systems.

[0249] In some embodiments, the napDNAbp may be a C2c1, a C2c2, or a C2c3 protein. In some embodiments, the napDNAbp is a C2c1 protein. In some embodiments, the napDNAbp is a C2c2 protein. In some embodiments, the napDNAbp is a C2c3 protein. In some embodiments, the napDNAbp comprises an amino acid sequence that is at least 85%, at least 90%, at least 91%, at least 92%, at least 93%, at least 94%, at least 95%, at least 96%, at least 97%, at least 98%, at least 99%, or at least 99.5% identical to a naturally-occurring C2c1, C2c2, or C2c3 protein. In some embodiments, the napDNAbp is a naturally-occurring C2c1, C2c2, or C2c3 protein.

[0250] Some aspects of the disclosure provide Cas9 domains that have different PAM specificities. Typically, Cas9 proteins, such as Cas9 from S. pyogenes (spCas9), require a canonical NGG PAM sequence to bind a particular nucleic acid region. This may limit the ability to edit desired bases within a genome. In some embodiments, the base editing base editors provided herein may need to be placed at a precise location, for example where a target base is placed within a 4 base region (e.g., a “editing window” or a “target window”), which is approximately 15 bases upstream of the PAM. See Komor, A. C., et al., “Programmable editing of a target base in genomic DNA without double-stranded DNA cleavage” Nature 533, 420-424 (2016), the entire contents of which are hereby incorporated by reference. Accordingly, in some embodiments, any of the base editors provided herein may contain a Cas9 domain that is capable of binding a nucleotide sequence that does not contain a canonical (e.g., NGG) PAM sequence. Cas9 domains that bind to non-canonical PAM sequences have been described in the art and would be apparent to the skilled artisan. For example, Cas9 domains that bind non-canonical PAM sequences have been described in Kleinstiver, B. P., et al., “Engineered CRISPR-Cas9 nucleases with altered PAM specificities” Nature 523, 481-485 (2015); and Kleinstiver, B. P., et al., “Broadening the targeting range of Staphylococcus aureus CRISPR-Cas9 by modifying PAM recognition” Nature Biotechnology 33, 1293-1298 (2015); the entire contents of each are hereby incorporated by reference.

[0251] For example, a napDNAbp domain with altered PAM specificity, such as a domain with at least 80%, at least 85%, at least 90%, at least 95%, or at least 99% sequence identity with wild type Francisella novicida Cpf1 (SEQ ID NO: 393) (D917, E1006, and D1255), which has the following amino acid sequence:

(SEQ ID NO: 393)
MSIYQEFVNKYSLSKTLRFELIPQGKTLENIKARGLILDDEKRAKDYKKA
KQIIDKYHQFFIEEILSSVCISEDLLQNYSDVYFKLKKSDDDNLQKDFKS
AKDTIKKQISEYIKDSEKFKNLFNQNLIDAKKGQESDLILWLKQSKDNGI
ELFKANSDITDIDEALEIIKSFKGWTTYFKGFHENRKNVYSSNDIPTSII
YRIVDDNLPKFLENKAKYESLKDKAPEAINYEQIKKDLAEELTFDIDYKT
SEVNQRVFSLDEVFEIANFNNYLNQSGITKFNTIIGGKFVNGENTKRKGI
NEYINLYSQQINDKTLKKYKMSVLFKQILSDTESKSFVIDKLEDDSDVVT
TMQSFYEQIAAFKTVEEKSIKETLSLLFDDLKAQKLDLSKIYFKNDKSLT
DLSQQVFDDYSVIGTAVLEYITQQIAPKNLDNPSKKEQELIAKKTEKAKY
LSLETIKLALEEFNKHRDIDKQCRFEEILANFAAIPMIFDEIAQNKDNLA
QISIKYQNQGKKDLLQASAEDDVKAIKDLLDQTNNLLHKLKIFHISQSED
KANILDKDEHFYLVFEECYFELANIVPLYNKIRNYITQKPYSDEKFKLNF
ENSTLANGWDKNKEPDNTAILFIKDDKYYLGVMNKKNNKIFDDKAIKENK
GEGYKKIVYKLLPGANKMLPKVFFSAKSIKFYNPSEDILRIRNHSTHTKN
GSPQKGYEKFEFNIEDCRKFIDFYKQSISKHPEWKDFGFRFSDTQRYNSI
DEFYREVENQGYKLTFENISESYIDSVVNQGKLYLFQIYNKDFSAYSKGR
PNLHTLYWKALFDERNLQDVVYKLNGEAELFYRKQSIPKKITHPAKEAIA
NKNKDNPKKESVFEYDLIKDKRFTEDKFFFHCPITINFKSSGANKFNDEI
NLLLKEKANDVHILSIDRGERHLAYYTLVDGKGNIIKQDTFNIIGNDRMK
TNYHDKLAAIEKDRDSARKDWKKINNIKEMKEGYLSQVVHEIAKLVIEYN
AIVVFEDLNFGFKRGRFKVEKQVYQKLEKMLIEKLNYLVFKDNEFDKTGG
VLRAYQLTAPFETFKKMGKQTGIIYYVPAGFTSKICPVTGFVNQLYPKYE
SVSKSQEFFSKFDKICYNLDKGYFEFSFDYKNFGDKAAKGKWTIASFGSR
LINFRNSDKNHNWDTREVYPTKELEKLLKDYSIEYGHGECIKAAICGESD
KKFFAKLTSVLNTILQMRNSKTGTELDYLISPVADVNGNFFDSRQAPKNM
PQDADANGAYHIGLKGLMLLGRIKNNQEGKKLNLVIKNEEYFEFVQNRNN

[0252] An additional napDNAbp domain with altered PAM specificity, such as a domain having at least 80%, at least 85%, at least 90%, at least 95%, or at least 99% sequence identity with wild type Geobacillus thermodenitrificans Cas9 (SEQ ID NO: 394), which has the following amino acid sequence:

(SEQ ID NO: 394)
MKYKIGLDIGITSIGWAVINLDIPRIEDLGVRIFDRAENPKTGESLALPR
RLARSARRRLRRRKHRLERIRRLFVREGILTKEELNKLFEKKHEIDVWQL
RVEALDRKLNNDELARILLHLAKRRGFRSNRKSERTNKENSTMLKHIEEN
QSILSSYRTVAEMVVKDPKFSLHKRNKEDNYTNTVARDDLEREIKLIFAK
QREYGNIVCTEAFEHEYISIWASQRPFASKDDIEKKVGFCTFEPKEKRAP
KATYTFQSFTVWEHINKLRLVSPGGIRALTDDERRLIYKQAFHKNKITFH
DVRTLLNLPDDTRFKGLLYDRNTTLKENEKVRFLELGAYHKIRKAIDSVY
GKGAAKSFRPIDFDTFGYALTMFKDDTDIRSYLRNEYEQNGKRMENLADK
VYDEELIEELLNLSFSKFGHLSLKALRNILPYMEQGEVYSTACERAGYTF
TGPKKKQKTVLLPNIPPIANPVVMRALTQARKVVNAIIKKYGSPVSIHIE
LARELSQSFDERRKMQKEQEGNRKKNETAIRQLVEYGLTLNPTGLDIVKF
KLWSEQNGKCAYSLQPIEIERLLEPGYTEVDHVIPYSRSLDDSYTNKVLV
LTKENREKGNRTPAEYLGLGSERWQQFETFVLTNKQFSKKKRDRLLRLHY
DENEENEFKNRNLNDTRYISRFLANFIREHLKFADSDDKQKVYTVNGRIT
AHLRSRWNFNKNREESNLHHAVDAAIVACTTPSDIARVTAFYQRREQNKE
LSKKTDPQFPQPWPHFADELQARLSKNPKESIKALNLGNYDNEKLESLQP
VFVSRMPKRSITGAAHQETLRRYIGIDERSGKIQTVVKKKLSEIQLDKTG
HFPMYGKESDPRTYEAIRQRLLEHNNDPKKAFQEPLYKPKKNGELGPIIR
TIKIIDTTNQVIPLNDGKTVAYNSNIVRVDVFEKDGKYYCVPIYTIDMMK
GILPNKAIEPNKPYSEWKEMTEDYTFRFSLYPNDLIRIEFPREKTIKTAV
GEEIKIKDLFAYYQTIDSSNGGLSLVSHDNNFSLRSIGSRTLKRFEKYQV
DVLGNIYKVRGEKRVGVASSSHSKAGETIRPL

[0253] In some embodiments, the nucleic acid programmable DNA binding protein (napDNAbp) is a nucleic acid programmable DNA binding protein that does not require a canonical (NGG) PAM sequence. In some embodiments, the napDNAbp is an argonaute protein. One example of such a nucleic acid programmable DNA binding protein is an Argonaute protein from Natronobacterium gregoryi (NgAgo). NgAgo is a ssDNA-guided endonuclease. NgAgo binds 5′ phosphorylated ssDNA of ˜24 nucleotides (gDNA) to guide it to its target site and will make DNA double-strand breaks at the gDNA site. In contrast to Cas9, the NgAgo-gDNA system does not require a protospacer-adjacent motif (PAM). Using a nuclease inactive NgAgo (dNgAgo) can greatly expand the bases that may be targeted. The characterization and use of NgAgo have been described in Gao et al., Nat Biotechnol., 34(7): 768-73 (2016), PubMed PMID: 27136078; Swarts et al., Nature, 507(7491): 258-61 (2014); and Swarts et al., Nucleic Acids Res. 43(10) (2015): 5120-9, each of which is incorporated herein by reference. The sequence of Natronobacterium gregoryi Argonaute is provided in SEQ ID NO: 813095.

[0254] The disclosed base editors may comprise a napDNAbp domain having at least 80%, at least 85%, at least 90%, at least 95%, or at least 99% sequence identity with wild type Natronobacterium gregoryi Argonaute (SEQ ID NO: 395), which has the following amino acid sequence:

(SEQ ID NO: 395)
MTVIDLDSTTTADELTSGHTYDISVTLTGVYDNTDEQHPRMSLAFEQDNG
ERRYITLWKNTTPKDVFTYDYATGSTYIFTNIDYEVKDGYENLTATYQTT
VENATAQEVGTTDEDETFAGGEPLDHHLDDALNETPDDAETESDSGHVMT
SFASRDQLPEWTLHTYTLTATDGAKTDTEYARRTLAYTVRQELYTDHDAA
PVATDGLMLLTPEPLGETPLDLDCGVRVEADETRTLDYTTAKDRLLAREL
VEEGLKRSLWDDYLVRGIDEVLSKEPVLTCDEFDLHERYDLSVEVGHSGR
AYLHINFRHRFVPKLTLADIDDDNIYPGLRVKTTYRPRRGHIVWGLRDEC
ATDSLNTLGNQSVVAYHRNNQTPINTDLLDAIEAADRRVVETRRQGHGDD
AVSFPQELLAVEPNTHQIKQFASDGFHQQARSKTRLSASRCSEKAQAFAE
RLDPVRLNGSTVEFSSEFFTGNNEQQLRLLYENGESVLTFRDGARGAHPD
ETFSKGIVNPPESFEVAVVLPEQQADTCKAQWDTMADLLNQAGAPPTRSE
TVQYDAFSSPESISLNVAGAIDPSEVDAAFVVLPPDQEGFADLASPTETY
DELKKALANMGIYSQMAYFDRFRDAKIFYTRNVALGLLAAAGGVAFTTEH
AMPGDADMFIGIDVSRSYPEDGASGQINIAATATAVYKDGTILGHSSTRP
QLGEKLQSTDVRDIMKNAILGYQQVTGESPTHIVIHRDGFMNEDLDPATE
FLNEQGVEYDIVEIRKQPQTRLLAVSDVQYDTPVKSIAAINQNEPRATVA
TFGAPEYLATRDGGGLPRPIQIERVAGETDIETLTRQVYLLSQSHIQVHN
STARLPITTAYADQASTHATKGYLVQTGAFESNVGFL

[0255] H. Cas9 Circular Permutants

[0256] In various embodiments, the adenine base editors disclosed herein may comprise a circular permutant of Cas9.

[0257] The term “circularly permuted Cas9” or “circular permutant” of Cas9 or “CP-Cas9”) refers to any Cas9 protein, or variant thereof, that occurs or has been modify to engineered as a circular permutant variant, which means the N-terminus and the C-terminus of a Cas9 protein (e.g., a wild type Cas9 protein) have been topically rearranged. Such circularly permuted Cas9 proteins, or variants thereof, retain the ability to bind DNA when complexed with a guide RNA (gRNA). See, Oakes et al., “Protein Engineering of Cas9 for enhanced function,” Methods Enzymol, 2014, 546: 491-511 and Oakes et al., “CRISPR-Cas9 Circular Permutants as Programmable Scaffolds for Genome Modification,” Cell, Jan. 10, 2019, 176: 254-267, and Huang, T. P. et al. Circularly permuted and PAM-modified Cas9 variants broaden the targeting scope of base editors. Nat. Biotechnol. 37, 626-631 (2019). each of are incorporated herein by reference. Reference is also made to International Publication No. WO 2020/041751, published Feb. 27, 2020, herein incorporated by reference. The present disclosure contemplates any previously known CP-Cas9 or use a new CP-Cas9 so long as the resulting circularly permuted protein retains the ability to bind DNA when complexed with a guide RNA (gRNA).

[0258] Any of the Cas9 proteins described herein, including any variant, ortholog, or naturally occurring Cas9 or equivalent thereof, may be reconfigured as a circular permutant variant.

[0259] In various embodiments, the circular permutants of Cas9 may have the following structure: N-terminus-[original C-terminus]-[optional linker]-[original N-terminus]-C-terminus.

[0260] As an example, the present disclosure contemplates the following circular permutants of canonical S. pyogenes Cas9 (1368 amino acids of UniProtKB—Q99ZW2 (CAS9_STRP1) (numbering is based on the amino acid position in SEQ ID NO: 326)): N-terminus-[1268-1368]-[optional linker]-[1-1267]-C-terminus; N-terminus-[1168-1368]-[optional linker]-[1-1167]-C-terminus; N-terminus-[1068-1368]-[optional linker]-[1-1067]-C-terminus; N-terminus-[968-1368]-[optional linker]-[1-967]-C-terminus; N-terminus-[868-1368]-[optional linker]-[1-867]-C-terminus; N-terminus-[768-1368]-[optional linker]-[1-767]-C-terminus; N-terminus-[668-1368]-[optional linker]-[1-667]-C-terminus; N-terminus-[568-1368]-[optional linker]-[1-567]-C-terminus; N-terminus-[468-1368]-[optional linker]-[1-467]-C-terminus; N-terminus-[368-1368]-[optional linker]-[1-367]-C-terminus; N-terminus-[268-1368]-[optional linker]-[1-267]-C-terminus; N-terminus-[168-1368]-[optional linker]-[1-167]-C-terminus; N-terminus-[68-1368]-[optional linker]-[1-67]-C-terminus; or N-terminus-[10-1368]-[optional linker]-[1-9]-C-terminus, or the corresponding circular permutants of other Cas9 proteins (including other Cas9 orthologs, variants, etc).

[0261] In particular embodiments, the circular permuant Cas9 has the following structure (based on S. pyogenes Cas9 (1368 amino acids of UniProtKB—Q99ZW2 (CAS9_STRP1) (numbering is based on the amino acid position in SEQ ID NO: 326): N-terminus-[102-1368]-[optional linker]-[1-101]-C-terminus; N-terminus-[1028-1368]-[optional linker]-[1-1027]-C-terminus; N-terminus-[1041-1368]-[optional linker]-[1-1043]-C-terminus; N-terminus-[1249-1368]-[optional linker]-[1-1248]-C-terminus; or N-terminus-[1300-1368]-[optional linker]-[1-1299]-C-terminus, or the corresponding circular permutants of other Cas9 proteins (including other Cas9 orthologs, variants, etc).

[0262] In still other embodiments, the circular permuant Cas9 has the following structure (based on S. pyogenes Cas9 (1368 amino acids of UniProtKB—Q99ZW2 (CAS9_STRP1) (numbering is based on the amino acid position in SEQ ID NO: 326): N-terminus-[103-1368]-[optional linker]-[1-102]-C-terminus; N-terminus-[1029-1368]-[optional linker]-[1-1028]-C-terminus; N-terminus-[1042-1368]-[optional linker]-[1-1041]-C-terminus; N-terminus-[1250-1368]-[optional linker]-[1-1249]-C-terminus; or N-terminus-[1301-1368]-[optional linker]-[1-1300]-C-terminus, or the corresponding circular permutants of other Cas9 proteins (including other Cas9 orthologs, variants, etc.).

[0263] In some embodiments, the circular permutant can be formed by linking a C-terminal fragment of a Cas9 to an N-terminal fragment of a Cas9, either directly or by using a linker, such as an amino acid linker. In some embodiments, The C-terminal fragment may correspond to the C-terminal 95% or more of the amino acids of a Cas9 (e.g., amino acids about 1300-1368), or the C-terminal 90%, 85%, 80%, 75%, 70%, 65%, 60%, 55%, 50%, 45%, 40%, 35%, 30%, 25%, 20%, 15%, 10%, or 5% or more of a Cas9 (e.g., any one of SEQ ID NOs: 18-25). The N-terminal portion may correspond to the N-terminal 95% or more of the amino acids of a Cas9 (e.g., amino acids about 1-1300), or the N-terminal 90%, 85%, 80%, 75%, 70%, 65%, 60%, 55%, 50%, 45%, 40%, 35%, 30%, 25%, 20%, 15%, 10%, or 5% or more of a Cas9 (e.g., of SEQ ID NO: 326).

[0264] In some embodiments, the circular permutant can be formed by linking a C-terminal fragment of a Cas9 to an N-terminal fragment of a Cas9, either directly or by using a linker, such as an amino acid linker. In some embodiments, the C-terminal fragment that is rearranged to the N-terminus, includes or corresponds to the C-terminal 30% or less of the amino acids of a Cas9 (e.g., amino acids 1012-1368 of SEQ ID NO: 326). In some embodiments, the C-terminal fragment that is rearranged to the N-terminus, includes or corresponds to the C-terminal 30%, 29%, 28%, 27%, 26%, 25%, 24%, 23%, 22%, 21%, 20%, 19%, 18%, 17%, 16%, 15%, 14%, 13%, 12%, 11%, 10%, 9%, 8%, 7%, 6%, 5%, 4%, 3%, 2%, or 1% of the amino acids of a Cas9 (e.g., the Cas9 of SEQ ID NO: 326). In some embodiments, the C-terminal fragment that is rearranged to the N-terminus, includes or corresponds to the C-terminal 410 residues or less of a Cas9 (e.g., the Cas9 of SEQ ID NO: 326). In some embodiments, the C-terminal portion that is rearranged to the N-terminus, includes or corresponds to the C-terminal 410, 400, 390, 380, 370, 360, 350, 340, 330, 320, 310, 300, 290, 280, 270, 260, 250, 240, 230, 220, 210, 200, 190, 180, 170, 160, 150, 140, 130, 120, 110, 100, 90, 80, 70, 60, 50, 40, 30, 20, or 10 residues of a Cas9 (e.g., the Cas9 of SEQ ID NO: 326). In some embodiments, the C-terminal portion that is rearranged to the N-terminus, includes or corresponds to the C-terminal 357, 341, 328, 120, or 69 residues of a Cas9 (e.g., the Cas9 of SEQ ID NO: 326).

[0265] In other embodiments, circular permutant Cas9 variants may be defined as a topological rearrangement of a Cas9 primary structure based on the following method, which is based on S. pyogenes Cas9 of SEQ ID NO: 326: (a) selecting a circular permutant (CP) site corresponding to an internal amino acid residue of the Cas9 primary structure, which dissects the original protein into two halves: an N-terminal region and a C-terminal region; (b) modifying the Cas9 protein sequence (e.g., by genetic engineering techniques) by moving the original C-terminal region (comprising the CP site amino acid) to preceed the original N-terminal region, thereby forming a new N-terminus of the Cas9 protein that now begins with the CP site amino acid residue. The CP site can be located in any domain of the Cas9 protein, including, for example, the helical-II domain, the RuvCIII domain, or the CTD domain. For example, the CP site may be located (relative the S. pyogenes Cas9 of SEQ ID NO: 326) at original amino acid residue 181, 199, 230, 270, 310, 1010, 1016, 1023, 1029, 1041, 1247, 1249, or 1282. Thus, once relocated to the N-terminus, original amino acid 181, 199, 230, 270, 310, 1010, 1016, 1023, 1029, 1041, 1247, 1249, or 1282 would become the new N-terminal amino acid. Nomenclature of these CP-Cas9 proteins may be referred to as Cas9-CP¹⁸¹, Cas9-CP¹⁹⁹, Cas9-CP²³⁰, Cas9-CP²⁷⁰, Cas9_CP³¹⁰, Cas9-CP¹⁰¹⁰, Cas9-CP¹⁰¹⁶, Cas9-CP¹⁰²³, Cas9-CP¹⁰²⁹, Cas9_CP¹⁰⁴¹, Cas9-CP¹²⁴⁷, Cas9-CP¹²⁴⁹, and Cas9-CP¹²⁸², respectively. This description is not meant to be limited to making CP variants from SEQ ID NO: 326, but may be implemented to make CP variants in any Cas9 sequence, either at CP sites that correspond to these positions, or at other CP sites entirely. This description is not meant to limit the specific CP sites in any way. Virtually any CP site may be used to form a CP-Cas9 variant.

[0266] Exemplary CP-Cas9 amino acid sequences, based on the Cas9 of SEQ ID NO: 326, are provided below in which linker sequences are indicated by underlining and optional methionine (M) residues are indicated in bold. It should be appreciated that the disclosure provides CP-Cas9 sequences that do not include a linker sequence or that include different linker sequences. It should be appreciated that CP-Cas9 sequences may be based on Cas9 sequences other than that of SEQ ID NO: 326 and any examples provided herein are not meant to be limiting. Exemplary CP-Cas9 sequences are as follows:

| CP name | Sequence | SEQ ID NO: |
|---|---|---|
| CP1012 | DYKVYDVRKMIAKSEQEIGKATAKYFFYSNIMNFFKTEITLANGEIRKRPLIETN | SEQ ID NO: |
| | GETGEIVWDKGRDFATVRKVLSMPQVNIVKKTEVQTGGFSKESILPKRNSDKLIA | 396 |
| | RKKDWDPKKYGGFDSPTVAYSVLVVAKVEKGKSKKLKSVKELLGITIMERSSFEK | |
| | NPIDFLEAKGYKEVKKDLIIKLPKYSLFELENGRKRMLASAGELQKGNELALPSK | |
| | YVNFLYLASHYEKLKGSPEDNEQKQLFVEQHKHYLDEIIEQISEFSKRVILADAN | |
| | LDKVLSAYNKHRDKPIREQAENIIHLFTLTNLGAPAAFKYFDTTIDRKRYTSTKE | |
| | VLDATLIHQSITGLYETRIDLSQLGGDGGSGGSGGSGGSGGSGGSGGDKKYSIGL | |
| | AIGTNSVGWAVITDEYKVPSKKFKVLGNTDRHSIKKNLIGALLFDSGETAEATRL | |
| | KRTARRRYTRRKNRICYLQEIFSNEMAKVDDSFFHRLEESFLVEEDKKHERHPIF | |
| | GNIVDEVAYHEKYPTIYHLRKKLVDSTDKADLRLIYLALAHMIKFRGHFLIEGDL | |
| | NPDNSDVDKLFIQLVQTYNQLFEENPINASGVDAKAILSARLSKSRRLENLIAQL | |
| | PGEKKNGLFGNLIALSLGLTPNFKSNFDLAEDAKLQLSKDTYDDDLDNLLAQIGD | |
| | QYADLFLAAKNLSDAILLSDILRVNTEITKAPLSASMIKRYDEHHQDLTLLKALV | |
| | RQQLPEKYKEIFFDQSKNGYAGYIDGGASQEEFYKFIKPILEKMDGTEELLVKLN | |
| | REDLLRKQRTFDNGSIPHQIHLGELHAILRRQEDFYPFLKDNREKIEKILTFRIP | |
| | YYVGPLARGNSRFAWMTRKSEETITPWNFEEVVDKGASAQSFIERMTNFDKNLPN | |
| | EKVLPKHSLLYEYFTVYNELTKVKYVTEGMRKPAFLSGEQKKAIVDLLFKTNRKV | |
| | TVKQLKEDYFKKIECFDSVEISGVEDRFNASLGTYHDLLKIIKDKDFLDNEENED | |
| | ILEDIVLTLTLFEDREMIEERLKTYAHLFDDKVMKQLKRRRYTGWGRLSRKLING | |
| | IRDKQSGKTILDFLKSDGFANRNFMQLIHDDSLTFKEDIQKAQVSGQGDSLHEHI | |
| | ANLAGSPAIKKGILQTVKVVDELVKVMGRHKPENIVIEMARENQTTQKGQKNSRE | |
| | RMKRIEEGIKELGSQILKEHPVENTQLQNEKLYLYYLQNGRDMYVDQELDINRLS | |
| | DYDVDHIVPQSFLKDDSIDNKVLTRSDKNRGKSDNVPSEEVVKKMKNYWRQLLNA | |
| | KLITQRKFDNLTKAERGGLSELDKAGFIKRQLVETRQITKHVAQILDSRMNTKYD | |
| | ENDKLIREVKVITLKSKLVSDFRKDFQFYKVREINNYHHAHDAYLNAVVGTALIK | |
| | KYPKLESEFVYG | |
| CP1028 | EIGKATAKYFFYSNIMNFFKTEITLANGEIRKRPLIETNGETGEIVWDKGRDFAT | SEQ ID NO: |
| | VRKVLSMPQVNIVKKTEVQTGGFSKESILPKRNSDKLIARKKDWDPKKYGGFDSP | 397 |
| | TVAYSVLVVAKVEKGKSKKLKSVKELLGITIMERSSFEKNPIDFLEAKGYKEVKK | |
| | DLIIKLPKYSLFELENGRKRMLASAGELQKGNELALPSKYVNFLYLASHYEKLKG | |
| | SPEDNEQKQLFVEQHKHYLDEIIEQISEFSKRVILADANLDKVLSAYNKHRDKPI | |
| | REQAENIIHLFTLTNLGAPAAFKYFDTTIDRKRYTSTKEVLDATLIHQSITGLYE | |
| | TRIDLSQLGGDGGSGGSGGSGGSGGSGGSGGMDKKYSIGLAIGTNSVGWAVITDE | |
| | YKVPSKKFKVLGNTDRHSIKKNLIGALLFDSGETAEATRLKRTARRRYTRRKNRI | |
| | CYLQEIFSNEMAKVDDSFFHRLEESFLVEEDKKHERHPIFGNIVDEVAYHEKYPT | |
| | IYHLRKKLVDSTDKADLRLIYLALAHMIKFRGHFLIEGDLNPDNSDVDKLFIQLV | |
| | QTYNQLFEENPINASGVDAKAILSARLSKSRRLENLIAQLPGEKKNGLFGNLIAL | |
| | SLGLTPNFKSNFDLAEDAKLQLSKDTYDDDLDNLLAQIGDQYADLFLAAKNLSDA | |
| | ILLSDILRVNTEITKAPLSASMIKRYDEHHQDLTLLKALVRQQLPEKYKEIFFDQ | |
| | SKNGYAGYIDGGASQEEFYKFIKPILEKMDGTEELLVKLNREDLLRKQRTFDNGS | |
| | IPHQIHLGELHAILRRQEDFYPFLKDNREKIEKILTFRIPYYVGPLARGNSRFAW | |
| | MTRKSEETITPWNFEEVVDKGASAQSFIERMTNFDKNLPNEKVLPKHSLLYEYFT | |
| | VYNELTKVKYVTEGMRKPAFLSGEQKKAIVDLLFKTNRKVTVKQLKEDYFKKIEC | |
| | FDSVEISGVEDRFNASLGTYHDLLKIIKDKDFLDNEENEDILEDIVLTLTLFEDR | |
| | EMIEERLKTYAHLFDDKVMKQLKRRRYTGWGRLSRKLINGIRDKQSGKTILDFLK | |
| | SDGFANRNFMQLIHDDSLTFKEDIQKAQVSGQGDSLHEHIANLAGSPAIKKGILQ | |
| | TVKVVDELVKVMGRHKPENIVIEMARENQTTQKGQKNSRERMKRIEEGIKELGSQ | |
| | ILKEHPVENTQLQNEKLYLYYLQNGRDMYVDQELDINRLSDYDVDHIVPQSFLKD | |
| | DSIDNKVLTRSDKNRGKSDNVPSEEVVKKMKNYWRQLLNAKLITQRKFDNLTKAE | |
| | RGGLSELDKAGFIKRQLVETRQITKHVAQILDSRMNTKYDENDKLIREVKVITLK | |
| | SKLVSDFRKDFQFYKVREINNYHHAHDAYLNAVVGTALIKKYPKLESEFVYGDYK | |
| | VYDVRKMIAKSEQ | |
| CP1041 | NIMNFFKTEITLANGEIRKRPLIETNGETGEIVWDKGRDFATVRKVLSMPQVNIV | SEQ ID NO: |
| | KKTEVQTGGFSKESILPKRNSDKLIARKKDWDPKKYGGFDSPTVAYSVLVVAKVE | 398 |
| | KGKSKKLKSVKELLGITIMERSSFEKNPIDFLEAKGYKEVKKDLIIKLPKYSLFE | |
| | LENGRKRMLASAGELQKGNELALPSKYVNFLYLASHYEKLKGSPEDNEQKQLFVE | |
| | QHKHYLDEIIEQISEFSKRVILADANLDKVLSAYNKHRDKPIREQAENIIHLFTL | |
| | TNLGAPAAFKYFDTTIDRKRYTSTKEVLDATLIHQSITGLYETRIDLSQLGGDGG | |
| | SGGSGGSGGSGGSGGSGGDKKYSIGLAIGTNSVGWAVITDEYKVPSKKFKVLGNT | |
| | DRHSIKKNLIGALLFDSGETAEATRLKRTARRRYTRRKNRICYLQEIFSNEMAKV | |
| | DDSFFHRLEESFLVEEDKKHERHPIFGNIVDEVAYHEKYPTIYHLRKKLVDSTDK | |
| | ADLRLIYLALAHMIKFRGHFLIEGDLNPDNSDVDKLFIQLVQTYNQLFEENPINA | |
| | SGVDAKAILSARLSKSRRLENLIAQLPGEKKNGLFGNLIALSLGLTPNFKSNFDL | |
| | AEDAKLQLSKDTYDDDLDNLLAQIGDQYADLFLAAKNLSDAILLSDILRVNTEIT | |
| | KAPLSASMIKRYDEHHQDLTLLKALVRQQLPEKYKEIFFDQSKNGYAGYIDGGAS | |
| | QEEFYKFIKPILEKMDGTEELLVKLNREDLLRKQRTFDNGSIPHQIHLGELHAIL | |
| | RRQEDFYPFLKDNREKIEKILTFRIPYYVGPLARGNSRFAWMTRKSEETITPWNF | |
| | EEVVDKGASAQSFIERMTNFDKNLPNEKVLPKHSLLYEYFTVYNELTKVKYVTEG | |
| | MRKPAFLSGEQKKAIVDLLFKTNRKVTVKQLKEDYFKKIECFDSVEISGVEDRFN | |
| | ASLGTYHDLLKIIKDKDFLDNEENEDILEDIVLTLTLFEDREMIEERLKTYAHLF | |
| | DDKVMKQLKRRRYTGWGRLSRKLINGIRDKQSGKTILDFLKSDGFANRNFMQLIH | |
| | DDSLTFKEDIQKAQVSGQGDSLHEHIANLAGSPAIKKGILQTVKVVDELVKVMGR | |
| | HKPENIVIEMARENQTTQKGQKNSRERMKRIEEGIKELGSQILKEHPVENTQLQN | |
| | EKLYLYYLQNGRDMYVDQELDINRLSDYDVDHIVPQSFLKDDSIDNKVLTRSDKN | |
| | RGKSDNVPSEEVVKKMKNYWRQLLNAKLITQRKFDNLTKAERGGLSELDKAGFIK | |
| | RQLVETRQITKHVAQILDSRMNTKYDENDKLIREVKVITLKSKLVSDFRKDFQFY | |
| | KVREINNYHHAHDAYLNAVVGTALIKKYPKLESEFVYGDYKVYDVRKMIAKSEQE | |
| | IGKATAKYFFYS | |
| CP1249 | PEDNEQKQLFVEQHKHYLDEIIEQISEFSKRVILADANLDKVLSAYNKHRDKPIR | SEQ ID NO: |
| | EQAENIIHLFTLTNLGAPAAFKYFDTTIDRKRYTSTKEVLDATLIHQSITGLYET | 399 |
| | RIDLSQLGGDGGSGGSGGSGGSGGSGGSGGMDKKYSIGLAIGTNSVGWAVITDEY | |
| | KVPSKKFKVLGNTDRHSIKKNLIGALLFDSGETAEATRLKRTARRRYTRRKNRIC | |
| | YLQEIFSNEMAKVDDSFFHRLEESFLVEEDKKHERHPIFGNIVDEVAYHEKYPTI | |
| | YHLRKKLVDSTDKADLRLIYLALAHMIKFRGHFLIEGDLNPDNSDVDKLFIQLVQ | |
| | TYNQLFEENPINASGVDAKAILSARLSKSRRLENLIAQLPGEKKNGLFGNLIALS | |
| | LGLTPNFKSNFDLAEDAKLQLSKDTYDDDLDNLLAQIGDQYADLFLAAKNLSDAI | |
| | LLSDILRVNTEITKAPLSASMIKRYDEHHQDLTLLKALVRQQLPEKYKEIFFDQS | |
| | KNGYAGYIDGGASQEEFYKFIKPILEKMDGTEELLVKLNREDLLRKQRTFDNGSI | |
| | PHQIHLGELHAILRRQEDFYPFLKDNREKIEKILTFRIPYYVGPLARGNSRFAWM | |
| | TRKSEETITPWNFEEVVDKGASAQSFIERMTNFDKNLPNEKVLPKHSLLYEYFTV | |
| | YNELTKVKYVTEGMRKPAFLSGEQKKAIVDLLFKTNRKVTVKQLKEDYFKKIECF | |
| | DSVEISGVEDRFNASLGTYHDLLKIIKDKDFLDNEENEDILEDIVLTLTLFEDRE | |
| | MIEERLKTYAHLFDDKVMKQLKRRRYTGWGRLSRKLINGIRDKQSGKTILDFLKS | |
| | DGFANRNFMQLIHDDSLTFKEDIQKAQVSGQGDSLHEHIANLAGSPAIKKGILQT | |
| | VKVVDELVKVMGRHKPENIVIEMARENQTTQKGQKNSRERMKRIEEGIKELGSQI | |
| | LKEHPVENTQLQNEKLYLYYLQNGRDMYVDQELDINRLSDYDVDHIVPQSFLKDD | |
| | SIDNKVLTRSDKNRGKSDNVPSEEVVKKMKNYWRQLLNAKLITQRKFDNLTKAER | |
| | GGLSELDKAGFIKRQLVETRQITKHVAQILDSRMNTKYDENDKLIREVKVITLKS | |
| | KLVSDFRKDFQFYKVREINNYHHAHDAYLNAVVGTALIKKYPKLESEFVYGDYKV | |
| | YDVRKMIAKSEQEIGKATAKYFFYSNIMNFFKTEITLANGEIRKRPLIETNGETG | |
| | EIVWDKGRDFATVRKVLSMPQVNIVKKTEVQTGGFSKESILPKRNSDKLIARKKD | |
| | WDPKKYGGFDSPTVAYSVLVVAKVEKGKSKKLKSVKELLGITIMERSSFEKNPID | |
| | FLEAKGYKEVKKDLIIKLPKYSLFELENGRKRMLASAGELQKGNELALPSKYVNE | |
| | LYLASHYEKLKGS | |
| CP1300 | KPIREQAENIIHLFTLTNLGAPAAFKYFDTTIDRKRYTSTKEVLDATLIHQSITG | SEQ ID NO: |
| | LYETRIDLSQLGGDGGSGGSGGSGGSGGSGGSGGDKKYSIGLAIGTNSVGWAVIT | 400 |
| | DEYKVPSKKFKVLGNTDRHSIKKNLIGALLFDSGETAEATRLKRTARRRYTRRKN | |
| | RICYLQEIFSNEMAKVDDSFFHRLEESFLVEEDKKHERHPIFGNIVDEVAYHEKY | |
| | PTIYHLRKKLVDSTDKADLRLIYLALAHMIKFRGHFLIEGDLNPDNSDVDKLFIQ | |
| | LVQTYNQLFEENPINASGVDAKAILSARLSKSRRLENLIAQLPGEKKNGLFGNLI | |
| | ALSLGLTPNFKSNFDLAEDAKLQLSKDTYDDDLDNLLAQIGDQYADLFLAAKNLS | |
| | DAILLSDILRVNTEITKAPLSASMIKRYDEHHQDLTLLKALVRQQLPEKYKEIFF | |
| | DQSKNGYAGYIDGGASQEEFYKFIKPILEKMDGTEELLVKLNREDLLRKQRTFDN | |
| | GSIPHQIHLGELHAILRRQEDFYPFLKDNREKIEKILTFRIPYYVGPLARGNSRF | |
| | AWMTRKSEETITPWNFEEVVDKGASAQSFIERMTNFDKNLPNEKVLPKHSLLYEY | |
| | FTVYNELTKVKYVTEGMRKPAFLSGEQKKAIVDLLFKTNRKVTVKQLKEDYFKKI | |
| | ECFDSVEISGVEDRFNASLGTYHDLLKIIKDKDFLDNEENEDILEDIVLTLTLFE | |
| | DREMIEERLKTYAHLFDDKVMKQLKRRRYTGWGRLSRKLINGIRDKQSGKTILDF | |
| | LKSDGFANRNFMQLIHDDSLTFKEDIQKAQVSGQGDSLHEHIANLAGSPAIKKGI | |
| | LQTVKVVDELVKVMGRHKPENIVIEMARENQTTQKGQKNSRERMKRIEEGIKELG | |
| | SQILKEHPVENTQLQNEKLYLYYLQNGRDMYVDQELDINRLSDYDVDHIVPQSFL | |
| | KDDSIDNKVLTRSDKNRGKSDNVPSEEVVKKMKNYWRQLLNAKLITQRKFDNLTK | |
| | AERGGLSELDKAGFIKRQLVETRQITKHVAQILDSRMNTKYDENDKLIREVKVIT | |
| | LKSKLVSDFRKDFQFYKVREINNYHHAHDAYLNAVVGTALIKKYPKLESEFVYGD | |
| | YKVYDVRKMIAKSEQEIGKATAKYFFYSNIMNFFKTEITLANGEIRKRPLIETNG | |
| | ETGEIVWDKGRDFATVRKVLSMPQVNIVKKTEVQTGGFSKESILPKRNSDKLIAR | |
| | KKDWDPKKYGGFDSPTVAYSVLVVAKVEKGKSKKLKSVKELLGITIMERSSFEKN | |
| | PIDFLEAKGYKEVKKDLIIKLPKYSLFELENGRKRMLASAGELQKGNELALPSKY | |
| | VNFLYLASHYEKLKGSPEDNEQKQLFVEQHKHYLDEIIEQISEFSKRVILADANL | |
| | DKVLSAYNKHRD | |

[0267] The Cas9 circular permutants that may be useful in the base editor constructs described herein. Exemplary C-terminal fragments of Cas9, based on the Cas9 of SEQ ID NO: 326, which may be rearranged to an N-terminus of Cas9, are provided below. It should be appreciated that such C-terminal fragments of Cas9 are exemplary and are not meant to be limiting. These exemplary CP-Cas9 fragments have the following sequences:

| CP name | Sequence | SEQ ID NO: |
|---|---|---|
| CP1012 C- | DYKVYDVRKMIAKSEQEIGKATAKYFFYSNIMNFFKTEITLANGEIRKRPLIETN | SEQ ID NO: |
| terminal | GETGEIVWDKGRDFATVRKVLSMPQVNIVKKTEVQTGGFSKESILPKRNSDKLIA | 401 |
| fragment | RKKDWDPKKYGGFDSPTVAYSVLVVAKVEKGKSKKLKSVKELLGITIMERSSFEK | |
| | NPIDFLEAKGYKEVKKDLIIKLPKYSLFELENGRKRMLASAGELQKGNELALPSK | |
| | YVNFLYLASHYEKLKGSPEDNEQKQLFVEQHKHYLDEIIEQISEFSKRVILADAN | |
| | LDKVLSAYNKHRDKPIREQAENIIHLFTLTNLGAPAAFKYFDTTIDRKRYTSTKE | |
| | VLDATLIHQSITGLYETRIDLSQLGGD | |
| CP1028 C- | EIGKATAKYFFYSNIMNFFKTEITLANGEIRKRPLIETNGETGEIVWDKGRDFAT | SEQ ID NO: |
| terminal | VRKVLSMPQVNIVKKTEVQTGGFSKESILPKRNSDKLIARKKDWDPKKYGGFDSP | 402 |
| fragment | TVAYSVLVVAKVEKGKSKKLKSVKELLGITIMERSSFEKNPIDFLEAKGYKEVKK | |
| | DLIIKLPKYSLFELENGRKRMLASAGELQKGNELALPSKYVNFLYLASHYEKLKG | |
| | SPEDNEQKQLFVEQHKHYLDEIIEQISEFSKRVILADANLDKVLSAYNKHRDKPI | |
| | REQAENIIHLFTLTNLGAPAAFKYFDTTIDRKRYTSTKEVLDATLIHQSITGLYE | |
| | TRIDLSQLGGD | |
| CP1041 C- | NIMNFFKTEITLANGEIRKRPLIETNGETGEIVWDKGRDFATVRKVLSMPQVNIV | SEQ ID NO: |
| terminal | KKTEVQTGGFSKESILPKRNSDKLIARKKDWDPKKYGGFDSPTVAYSVLVVAKVE | 403 |
| fragment | KGKSKKLKSVKELLGITIMERSSFEKNPIDFLEAKGYKEVKKDLIIKLPKYSLFE | |
| | LENGRKRMLASAGELQKGNELALPSKYVNFLYLASHYEKLKGSPEDNEQKQLFVE | |
| | QHKHYLDEIIEQISEFSKRVILADANLDKVLSAYNKHRDKPIREQAENIIHLFTL | |
| | TNLGAPAAFKYFDTTIDRKRYTSTKEVLDATLIHQSITGLYETRIDLSQLGGD | |
| CP1249 C- | PEDNEQKQLFVEQHKHYLDEIIEQISEFSKRVILADANLDKVLSAYNKHRDKPIR | SEQ ID NO: |
| terminal | EQAENIIHLFTLTNLGAPAAFKYFDTTIDRKRYTSTKEVLDATLIHQSITGLYET | 404 |
| fragment | RIDLSQLGGD | |
| CP1300 C- | KPIREQAENIIHLFTLTNLGAPAAFKYFDTTIDRKRYTSTKEVLDATLIHQSITG | SEQ ID NO: |
| terminal | LYETRIDLSQLGGD | 405 |
| fragment | | |

[0268] In some embodiments, the napDNAbp domain comprises a combination of more than one Cas homolog or variant, such as a circularly permuted Cas variant. In some embodiments, the napDNAbp domain comprises a first Cas variant and a second Cas variant. In some embodiments, the napDNAbp domain comprises a first Cas variant comprising a Cas9-NG and a second Cas variant comprising a Cas9-CP1041 variant. The combination of the CP1041 variant and the NG variant enables both broadened PAM targeting and an expanded editing window. Such a domain is referred to herein as “SpCas9-NG-CP1041.” In some embodiments, the napDNAbp domain comprises an amino acid sequence that has at least 80%, at least 8%, at least 90%, at least 92.5%, at least 95%, at least 97.5%, at least 98%, or at least 99% sequence identity to SEQ ID NO: 463. In some embodiments, the napDNAbp domain comprises the sequence of SEQ ID NO: 463.

(SEQ ID NO: 463)
NIMNFFKTEITLANGEIRKRPLIETNGETGEIVWDKGRDFATVRKVLSMP
QVNIVKKTEVQTGGFSKESIRPKRNSDKLIARKKDWDPKKYGGFVSPTVA
YSVLVVAKVEKGKSKKLKSVKELLGITIMERSSFEKNPIDFLEAKGYKEV
KKDLIIKLPKYSLFELENGRKRMLASARFLQKGNELALPSKYVNFLYLAS
HYEKLKGSPEDNEQKQLFVEQHKHYLDEIIEQISEFSKRVILADANLDKV
LSAYNKHRDKPIREQAENIIHLFTLTNLGAPRAFKYFDTTIDRKVYRSTK
EVLDATLIHQSITGLYETRIDLSQLGGDGGSGGSGGSGGSGGSGGSGGDK
KYSIGLAIGTNSVGWAVITDEYKVPSKKFKVLGNTDRHSIKKNLIGALLF
DSGETAEATRLKRTARRRYTRRKNRICYLQEIFSNEMAKVDDSFFHRLEE
SFLVEEDKKHERHPIFGNIVDEVAYHEKYPTIYHLRKKLVDSTDKADLRL
IYLALAHMIKFRGHFLIEGDLNPDNSDVDKLFIQLVQTYNQLFEENPINA
SGVDAKAILSARLSKSRRLENLIAQLPGEKKNGLFGNLIALSLGLTPNFK
SNFDLAEDAKLQLSKDTYDDDLDNLLAQIGDQYADLFLAAKNLSDAILLS
DILRVNTEITKAPLSASMIKRYDEHHQDLTLLKALVRQQLPEKYKEIFFD
QSKNGYAGYIDGGASQEEFYKFIKPILEKMDGTEELLVKLNREDLLRKQR
TFDNGSIPHQIHLGELHAILRRQEDFYPFLKDNREKIEKILTFRIPYYVG
PLARGNSRFAWMTRKSEETITPWNFEEVVDKGASAQSFIERMTNFDKNLP
NEKVLPKHSLLYEYFTVYNELTKVKYVTEGMRKPAFLSGEQKKAIVDLLF
KTNRKVTVKQLKEDYFKKIECFDSVEISGVEDRFNASLGTYHDLLKIIKD
KDFLDNEENEDILEDIVLTLTLFEDREMIEERLKTYAHLFDDKVMKQLKR
RRYTGWGRLSRKLINGIRDKQSGKTILDFLKSDGFANRNFMQLIHDDSLT
FKEDIQKAQVSGQGDSLHEHIANLAGSPAIKKGILQTVKVVDELVKVMGR
HKPENIVIEMARENQTTQKGQKNSRERMKRIEEGIKELGSQILKEHPVEN
TQLQNEKLYLYYLQNGRDMYVDQELDINRLSDYDVDHIVPQSFLKDDSID
NKVLTRSDKNRGKSDNVPSEEVVKKMKNYWRQLLNAKLITQRKFDNLTKA
ERGGLSELDKAGFIKRQLVETRQITKHVAQILDSRMNTKYDENDKLIREV
KVITLKSKLVSDFRKDFQFYKVREINNYHHAHDAYLNAVVGTALIKKYPK
LESEFVYGDYKVYDVRKMIAKSEQEIGKATAKYFFYS

[0269] In some embodiments, the napDNAbp domain comprises a first Cas variant comprising a Cas9-VRQR and a second Cas variant comprising a Cas9-CP1041 variant. Such a domain is referred to herein as “SpCas9-NG-VRQR.” In some embodiments, the napDNAbp domain comprises an amino acid sequence that has at least 80%, at least 8%, at least 90%, at least 92.5%, at least 95%, at least 97.5%, at least 98%, or at least 99% sequence identity to SEQ ID NO: 464. In some embodiments, the napDNAbp domain comprises the sequence of SEQ ID NO: 464.

(SEQ ID NO: 464)
NIMNFFKTEITLANGEIRKRPLIETNGETGEIVWDKGRDFATVRKVLSMP
QVNIVKKTEVQTGGFSKESIRPKRNSDKLIARKKDWDPKKYGGFVSPTVA
YSVLVVAKVEKGKSKKLKSVKELLGITIMERSSFEKNPIDFLEAKGYKEV
KKDLIIKLPKYSLFELENGRKRMLASARFLQKGNELALPSKYVNFLYLAS
HYEKLKGSPEDNEQKQLFVEQHKHYLDEIIEQISEFSKRVILADANLDKV
LSAYNKHRDKPIREQAENIIHLFTLTNLGAPRAFKYFDTTIDRKVYRSTK
EVLDATLIHQSITGLYETRIDLSQLGGDGGSGGSGGSGGSGGSGGSGGDK
KYSIGLAIGTNSVGWAVITDEYKVPSKKFKVLGNTDRHSIKKNLIGALLF
DSGETAEATRLKRTARRRYTRRKNRICYLQEIFSNEMAKVDDSFFHRLEE
SFLVEEDKKHERHPIFGNIVDEVAYHEKYPTIYHLRKKLVDSTDKADLRL
IYLALAHMIKFRGHFLIEGDLNPDNSDVDKLFIQLVQTYNQLFEENPINA
SGVDAKAILSARLSKSRRLENLIAQLPGEKKNGLFGNLIALSLGLTPNFK
SNFDLAEDAKLQLSKDTYDDDLDNLLAQIGDQYADLFLAAKNLSDAILLS
DILRVNTEITKAPLSASMIKRYDEHHQDLTLLKALVRQQLPEKYKEIFFD
QSKNGYAGYIDGGASQEEFYKFIKPILEKMDGTEELLVKLNREDLLRKQR
TFDNGSIPHQIHLGELHAILRRQEDFYPFLKDNREKIEKILTFRIPYYVG
PLARGNSRFAWMTRKSEETITPWNFEEVVDKGASAQSFIERMTNFDKNLP
NEKVLPKHSLLYEYFTVYNELTKVKYVTEGMRKPAFLSGEQKKAIVDLLF
KTNRKVTVKQLKEDYFKKIECFDSVEISGVEDRFNASLGTYHDLLKIIKD
KDFLDNEENEDILEDIVLTLTLFEDREMIEERLKTYAHLFDDKVMKQLKR
RRYTGWGRLSRKLINGIRDKQSGKTILDFLKSDGFANRNFMQLIHDDSLT
FKEDIQKAQVSGQGDSLHEHIANLAGSPAIKKGILQTVKVVDELVKVMGR
HKPENIVIEMARENQTTQKGQKNSRERMKRIEEGIKELGSQILKEHPVEN
TQLQNEKLYLYYLQNGRDMYVDQELDINRLSDYDVDHIVPQSFLKDDSID
NKVLTRSDKNRGKSDNVPSEEVVKKMKNYWRQLLNAKLITQRKFDNLTKA
ERGGLSELDKAGFIKRQLVETRQITKHVAQILDSRMNTKYDENDKLIREV
KVITLKSKLVSDFRKDFQFYKVREINNYHHAHDAYLNAVVGTALIKKYPK
LESEFVYGDYKVYDVRKMIAKSEQEIGKATAKYFFYS

[0270] I. Cas9 Variants with Modified PAM Specificities

[0271] The adenine base editors of the present disclosure may also comprise Cas9 variants with modified PAM specificities. Some aspects of this disclosure provide Cas9 proteins that exhibit activity on a target sequence that does not comprise the canonical PAM (5′-NGG-3′, where N is A, C, G, or T) at its 3′-end. In some embodiments, the Cas9 protein exhibits activity on a target sequence comprising a 5′-NGG-3′ PAM sequence at its 3′-end. In some embodiments, the Cas9 protein exhibits activity on a target sequence comprising a 5′-NNG-3′ PAM sequence at its 3′-end. In some embodiments, the Cas9 protein exhibits activity on a target sequence comprising a 5′-NNA-3′ PAM sequence at its 3′-end. In some embodiments, the Cas9 protein exhibits activity on a target sequence comprising a 5′-NNC-3′ PAM sequence at its 3′-end. In some embodiments, the Cas9 protein exhibits activity on a target sequence comprising a 5′-NNT-3′ PAM sequence at its 3′-end. In some embodiments, the Cas9 protein exhibits activity on a target sequence comprising a 5′-NGT-3′ PAM sequence at its 3′-end. In some embodiments, the Cas9 protein exhibits activity on a target sequence comprising a 5′-NGA-3′ PAM sequence at its 3′-end. In some embodiments, the Cas9 protein exhibits activity on a target sequence comprising a 5′-NGC-3′ PAM sequence at its 3′-end. In some embodiments, the Cas9 protein exhibits activity on a target sequence comprising a 5′-NAA-3′ PAM sequence at its 3′-end. In some embodiments, the Cas9 protein exhibits activity on a target sequence comprising a 5′-NAC-3′ PAM sequence at its 3′-end. In some embodiments, the Cas9 protein exhibits activity on a target sequence comprising a 5′-NAT-3′ PAM sequence at its 3′-end. In still other embodiments, the Cas9 protein exhibits activity on a target sequence comprising a 5′-NAG-3′ PAM sequence at its 3′-end.

[0272] In some embodiments, the disclosed adenine base editors comprise a napDNAbp domain comprising a SpCas9-NG, which has a PAM that corresponds to NGN. In some embodiments, the disclosed base editors comprise a napDNAbp domain that has a sequence that is at least 90%, at least 95%, at least 98%, or at least 99% identical to SpCas9-NG. The sequence of SpCas9-NG is illustrated below:

(SEQ ID NO: 477)
MDKKYSIGLAIGTNSVGWAVITDEYKVPSKKFKVLGNTDRHSIKKNLIGA
LLFDSGETAEATRLKRTARRRYTRRKNRICYLQEIFSNEMAKVDDSFFHR
LEESFLVEEDKKHERHPIFGNIVDEVAYHEKYPTIYHLRKKLVDSTDKAD
LRLIYLALAHMIKFRGHFLIEGDLNPDNSDVDKLFIQLVQTYNQLFEENP
INASGVDAKAILSARLSKSRRLENLIAQLPGEKKNGLFGNLIALSLGLTP
NFKSNFDLAEDAKLQLSKDTYDDDLDNLLAQIGDQYADLFLAAKNLSDAI
LLSDILRVNTEITKAPLSASMIKRYDEHHQDLTLLKALVRQQLPEKYKEI
FFDQSKNGYAGYIDGGASQEEFYKFIKPILEKMDGTEELLVKLNREDLLR
KQRTFDNGSIPHQIHLGELHAILRRQEDFYPFLKDNREKIEKILTFRIPY
YVGPLARGNSRFAWMTRKSEETITPWNFEEVVDKGASAQSFIERMTNFDK
NLPNEKVLPKHSLLYEYFTVYNELTKVKYVTEGMRKPAFLSGEQKKAIVD
LLFKTNRKVTVKQLKEDYFKKIECFDSVEISGVEDRFNASLGTYHDLLKI
IKDKDFLDNEENEDILEDIVLTLTLFEDREMIEERLKTYAHLFDDKVMKQ
LKRRRYTGWGRLSRKLINGIRDKQSGKTILDFLKSDGFANRNFMQLIHDD
SLTFKEDIQKAQVSGQGDSLHEHIANLAGSPAIKKGILQTVKVVDELVKV
MGRHKPENIVIEMARENQTTQKGQKNSRERMKRIEEGIKELGSQILKEHP
VENTQLQNEKLYLYYLQNGRDMYVDQELDINRLSDYDVDHIVPQSFLKDD
SIDNKVLTRSDKNRGKSDNVPSEEVVKKMKNYWRQLLNAKLITQRKFDNL
TKAERGGLSELDKAGFIKRQLVETRQITKHVAQILDSRMNTKYDENDKLI
REVKVITLKSKLVSDFRKDFQFYKVREINNYHHAHDAYLNAVVGTALIKK
YPKLESEFVYGDYKVYDVRKMIAKSEQEIGKATAKYFFYSNIMNFFKTEI
TLANGEIRKRPLIETNGETGEIVWDKGRDFATVRKVLSMPQVNIVKKTEV
QTGGFSKESIRPKRNSDKLIARKKDWDPKKYGGFVSPTVAYSVLVVAKVE
KGKSKKLKSVKELLGITIMERSSFEKNPIDFLEAKGYKEVKKDLIIKLPK
YSLFELENGRKRMLASARFLQKGNELALPSKYVNFLYLASHYEKLKGSPE
DNEQKQLFVEQHKHYLDEIIEQISEFSKRVILADANLDKVLSAYNKHRDK
PIREQAENIIHLFTLTNLGAPRAFKYFDTTIDRKVYRSTKEVLDATLIHQ
SITGLYETRIDLSQLGGD

[0273] In some embodiments, the disclosed base editors comprise a napDNAbp domain comprising a S. aureus Cas9 nickase KKH, or SaCas9-KKH, which has a PAM that corresponds to NNNRRT. This Cas9 variant contains the amino acid substitutions D10A, E782K, N968K, and R1015H relative to wild-type SaCas9, set forth as SEQ ID NO: 377. In some embodiments, the disclosed base editors comprise a napDNAbp domain that has a sequence that is at least 90%, at least 95%, at least 98%, or at least 99% identical to SaCas9-KKH. The sequence of SaCas9-KKH is illustrated below: S. aureus Cas9 nickase KKH (SaCas9-KKH)

(SEQ ID NO: 478)
MGKRNYILGLAIGITSVGYGIIDYETRDVIDAGVRLFKEANVENNEGRRS
KRGARRLKRRRRHRIQRVKKLLFDYNLLTDHSELSGINPYEARVKGLSQK
LSEEEFSAALLHLAKRRGVHNVNEVEEDTGNELSTKEQISRNSKALEEKY
VAELQLERLKKDGEVRGSINRFKTSDYVKEAKQLLKVQKAYHQLDQSFID
TYIDLLETRRTYYEGPGEGSPFGWKDIKEWYEMLMGHCTYFPEELRSVKY
AYNADLYNALNDLNNLVITRDENEKLEYYEKFQIIENVFKQKKKPTLKQI
AKEILVNEEDIKGYRVTSTGKPEFTNLKVYHDIKDITARKEIIENAELLD
QIAKILTIYQSSEDIQEELTNLNSELTQEEIEQISNLKGYTGTHNLSLKA
INLILDELWHTNDNQIAIFNRLKLVPKKVDLSQQKEIPTTLVDDFILSPV
VKRSFIQSIKVINAIIKKYGLPNDIIIELAREKNSKDAQKMINEMQKRNR
QTNERIEEIIRTTGKENAKYLIEKIKLHDMQEGKCLYSLEAIPLEDLLNN
PFNYEVDHIIPRSVSFDNSFNNKVLVKQEENSKKGNRTPFQYLSSSDSKI
SYETFKKHILNLAKGKGRISKTKKEYLLEERDINRFSVQKDFINRNLVDT
RYATRGLMNLLRSYFRVNNLDVKVKSINGGFTSFLRRKWKFKKERNKGYK
HHAEDALIIANADFIFKEWKKLDKAKKVMENQMFEEKQAESMPEIETEQE
YKEIFITPHQIKHIKDFKDYKYSHRVDKKPNRKLINDTLYSTRKDDKGNT
LIVNNLNGLYDKDNDKLKKLINKSPEKLLMYHHDPQTYQKLKLIMEQYGD
EKNPLYKYYEETGNYLTKYSKKDNGPVIKKIKYYGNKLNAHLDITDDYPN
SRNKVVKLSLKPYRFDVYLDNGVYKFVTVKNLDVIKKENYYEVNSKCYEE
AKKLKKISNQAEFIASFYKNDLIKINGELYRVIGVNNDLLNRIEVNMIDI
TYREYLENMNDKRPPHIIKTIASKTQSIKKYSTDILGNLYEVKSKKHPQI
IKKG

[0274] In some embodiments, the disclosed adenine base editors comprise a napDNAbp domain comprising a S. pyogenes Cas9 nickase KKH, or SpCas9-KKH, which has a PAM that corresponds to NNNRRT.

[0275] In some embodiments, the disclosed adenine base editors comprise a napDNAbp domain comprising a xCas9, an evolved variant of SpCas9. In some embodiments, the disclosed base editors comprise a napDNAbp domain that has a sequence that is at least 90%, at least 95%, at least 98%, or at least 99% identical to xCas9. The sequence of xCas9 is illustrated below:

(SEQ ID NO: 479)
MDKKYSIGLAIGTNSVGWAVITDEYKVPSKKFKVLGNTDRHSIKKNLIGA
LLFDSGETAEATRLKRTARRRYTRRKNRICYLQEIFSNEMAKVDDSFFHR
LEESFLVEEDKKHERHPIFGNIVDEVAYHEKYPTIYHLRKKLVDSTDKAD
LRLIYLALAHMIKFRGHFLIEGDLNPDNSDVDKLFIQLVQTYNQLFEENP
INASGVDAKAILSARLSKSRRLENLIAQLPGEKKNGLFGNLIALSLGLTP
NFKSNFDLAEDTKLQLSKDTYDDDLDNLLAQIGDQYADLFLAAKNLSDAI
LLSDILRVNTEITKAPLSASMIKLYDEHHQDLTLLKALVRQQLPEKYKEI
FFDQSKNGYAGYIDGGASQEEFYKFIKPILEKMDGTEELLVKLNREDLLR
KQRTFDNGIIPHQIHLGELHAILRRQEDFYPFLKDNREKIEKILTFRIPY
YVGPLARGNSRFAWMTRKSEETITPWNFEKVVDKGASAQSFIERMTNFDK
NLPNEKVLPKHSLLYEYFTVYNELTKVKYVTEGMRKPAFLSGDQKKAIVD
LLFKTNRKVTVKQLKEDYFKKIECFDSVEISGVEDRFNASLGTYHDLLKI
IKDKDFLDNEENEDILEDIVLTLTLFEDREMIEERLKTYAHLFDDKVMKQ
LKRRRYTGWGRLSRKLINGIRDKQSGKTILDFLKSDGFANRNFIQLIHDD
SLTFKEDIQKAQVSGQGDSLHEHIANLAGSPAIKKGILQTVKVVDELVKV
MGRHKPENIVIEMARENQTTQKGQKNSRERMKRIEEGIKELGSQILKEHP
VENTQLQNEKLYLYYLQNGRDMYVDQELDINRLSDYDVDHIVPQSFLKDD
SIDNKVLTRSDKNRGKSDNVPSEEVVKKMKNYWRQLLNAKLITQRKFDNL
TKAERGGLSELDKAGFIKRQLVETRQITKHVAQILDSRMNTKYDENDKLI
REVKVITLKSKLVSDFRKDFQFYKVREINNYHHAHDAYLNAVVGTALIKK
YPKLESEFVYGDYKVYDVRKMIAKSEQEIGKATAKYFFYSNIMNFFKTEI
TLANGEIRKRPLIETNGETGEIVWDKGRDFATVRKVLSMPQVNIVKKTEV
QTGGFSKESILPKRNSDKLIARKKDWDPKKYGGFDSPTVAYSVLVVAKVE
KGKSKKLKSVKELLGITIMERSSFEKNPIDFLEAKGYKEVKKDLIIKLPK
YSLFELENGRKRMLASAGVLQKGNELALPSKYVNFLYLASHYEKLKGSPE
DNEQKQLFVEQHKHYLDEIIEQISEFSKRVILADANLDKVLSAYNKHRDK
PIREQAENIIHLFTLTNLGAPAAFKYFDTTIDRKRYTSTKEVLDATLIHQ
SITGLYETRIDLSQLGGD

[0276] It should be appreciated that any of the amino acid mutations described herein, (e.g., A262T) from a first amino acid residue (e.g., A) to a second amino acid residue (e.g., T) may also include mutations from the first amino acid residue to an amino acid residue that is similar to (e.g., conserved) the second amino acid residue. For example, mutation of an amino acid with a hydrophobic side chain (e.g., alanine, valine, isoleucine, leucine, methionine, phenylalanine, tyrosine, or tryptophan) may be a mutation to a second amino acid with a different hydrophobic side chain (e.g., alanine, valine, isoleucine, leucine, methionine, phenylalanine, tyrosine, or tryptophan). For example, a mutation of an alanine to a threonine (e.g., a A262T mutation) may also be a mutation from an alanine to an amino acid that is similar in size and chemical properties to a threonine, for example, serine. As another example, mutation of an amino acid with a positively charged side chain (e.g., arginine, histidine, or lysine) may be a mutation to a second amino acid with a different positively charged side chain (e.g., arginine, histidine, or lysine). As another example, mutation of an amino acid with a polar side chain (e.g., serine, threonine, asparagine, or glutamine) may be a mutation to a second amino acid with a different polar side chain (e.g., serine, threonine, asparagine, or glutamine). Additional similar amino acid pairs include, but are not limited to, the following: phenylalanine and tyrosine; asparagine and glutamine; methionine and cysteine; aspartic acid and glutamic acid; and arginine and lysine. The skilled artisan would recognize that such conservative amino acid substitutions will likely have minor effects on protein structure and are likely to be well tolerated without compromising function. In some embodiments, any amino of the amino acid mutations provided herein from one amino acid to a threonine may be an amino acid mutation to a serine. In some embodiments, any amino of the amino acid mutations provided herein from one amino acid to an arginine may be an amino acid mutation to a lysine. In some embodiments, any amino of the amino acid mutations provided herein from one amino acid to an isoleucine, may be an amino acid mutation to an alanine, valine, methionine, or leucine. In some embodiments, any amino of the amino acid mutations provided herein from one amino acid to a lysine may be an amino acid mutation to an arginine. In some embodiments, any amino of the amino acid mutations provided herein from one amino acid to an aspartic acid may be an amino acid mutation to a glutamic acid or asparagine. In some embodiments, any amino of the amino acid mutations provided herein from one amino acid to a valine may be an amino acid mutation to an alanine, isoleucine, methionine, or leucine. In some embodiments, any amino of the amino acid mutations provided herein from one amino acid to a glycine may be an amino acid mutation to an alanine. It should be appreciated, however, that additional conserved amino acid residues would be recognized by the skilled artisan and any of the amino acid mutations to other conserved amino acid residues are also within the scope of this disclosure.

[0277] In some embodiments, the present disclosure may utilize any of the Cas9 variants disclosed in the SEQUENCES section below.

[0278] In some embodiments, the Cas9 protein comprises a combination of mutations that exhibit activity on a target sequence comprising a 5′-NAA-3 PAM sequence at its 3′-end. In some embodiments, the combination of mutations is present in any one of the clones listed in Table 1. In some embodiments, the combination of mutations is conservative mutations of the clones listed in Table 1. In some embodiments, the Cas9 protein comprises the combination of mutations of any one of the Cas9 clones listed in Table 1.

TABLE 1
NAA PAM Clones
Mutations from wild-type SpCas9 (e.g., SEQ ID NO: 326)

D177N, K218R, D614N, D1135N, P1137S, E1219V, A1320V, A1323D, R1333K
D177N, K218R, D614N, D1135N, E1219V, Q1221H, H1264Y, A1320V, R1333K
A10T, I322V, S409I, E427G, G715C, D1135N, E1219V, Q1221H, H1264Y, A1320V, R1333K
A367T, K710E, R1114G, D1135N, P1137S, E1219V, Q1221H, H1264Y, A1320V, R1333K
A10T, I322V, S409I, E427G, R753G, D861N, D1135N, K1188R, E1219V, Q1221H, H1264H,
A1320V, R1333K
A10T, I322V, S409I, E427G, R654L, V743I, R753G, M1021T, D1135N, D1180G, K1211R,
E1219V, Q1221H, H1264Y, A1320V, R1333K
A10T, I322V, S409I, E427G, V743I, R753G, E762G, D1135N, D1180G, K1211R, E1219V,
Q1221H, H1264Y, A1320V, R1333K
A10T, I322V, S409I, E427G, R753G, D1135N, D1180G, K1211R, E1219V, Q1221H, H1264Y,
S1274R, A1320V, R1333K
A10T, I322V, S409I, E427G, A589S, R753G, D1135N, E1219V, Q1221H, H1264H, A1320V,
R1333K
A10T, I322V, S409I, E427G, R753G, E757K, G865G, D1135N, E1219V, Q1221H, H1264Y,
A1320V, R1333K
A10T, I322V, S409I, E427G, R654L, R753G, E757K, D1135N, E1219V, Q1221H, H1264Y,
A1320V, R1333K
A10T, I322V, S409I, E427G, K599R, M631A, R654L, K673E, V743I, R753G, N758H, E762G,
D1135N, D1180G, E1219V, Q1221H, Q1256R, H1264Y, A1320V, A1323D, R1333K
A10T, I322V, S409I, E427G, R654L, K673E, V743I, R753G, E762G, N869S, N1054D, R1114G,
D1135N, D1180G, E1219V, Q1221H, H1264Y, A1320V, A1323D, R1333K
A10T, I322V, S409I, E427G, R654L, L727I, V743I, R753G, E762G, R859S, N946D, F1134L,
D1135N, D1180G, E1219V, Q1221H, H1264Y, N1317T, A1320V, A1323D, R1333K
A10T, I322V, S409I, E427G, R654L, K673E, V743I, R753G, E762G, N803S, N869S, Y1016D,
G1077D, R1114G, F1134L, D1135N, D1180G, E1219V, Q1221H, H1264Y, V1290G, L1318S,
A1320V, A1323D, R1333K
A10T, I322V, S409I, E427G, R654L, K673E, V743I, R753G, E762G, N803S, N869S, Y1016D,
G1077D, R1114G, F1134L, D1135N, K1151E, D1180G, E1219V, Q1221H, H1264Y, V1290G,
L1318S, A1320V, R1333K
A10T, I322V, S409I, E427G, R654L, K673E, V743I, R753G, E762G, N803S, N869S, Y1016D,
G1077D, R1114G, F1134L, D1135N, D1180G, E1219V, Q1221H, H1264Y, V1290G, L1318S,
A1320V, A1323D, R1333K
A10T, I322V, S409I, E427G, R654L, K673E, F693L, V743I, R753G, E762G, N803S, N869S,
L921P, Y1016D, G1077D, F1080S, R1114G, D1135N, D1180G, E1219V, Q1221H, H1264Y,
L1318S, A1320V, A1323D, R1333K
A10T, I322V, S409I, E427G, E630K, R654L, K673E, V743I, R753G, E762G, Q768H, N803S,
N869S, Y1016D, G1077D, R1114G, F1134L, D1135N, D1180G, E1219V, Q1221H, H1264Y,
L1318S, A1320V, R1333K
A10T, I322V, S409I, E427G, R654L, K673E, F693L, V743I, R753G, E762G, Q768H, N803S,
N869S, Y1016D, G1077D, R1114G, F1134L, D1135N, D1180G, E1219V, Q1221H, G1223S,
H1264Y, L1318S, A1320V, R1333K
A10T, I322V, S409I, E427G, R654L, K673E, F693L, V743I, R753G, E762G, N803S, N869S,
L921P, Y1016D, G1077D, F1801S, R1114G, D1135N, D1180G, E1219V, Q1221H, H1264Y,
L1318S, A1320V, A1323D, R1333K
A10T, I322V, S409I, E427G, R654L, V743I, R753G, M1021T, D1135N, D1180G, K1211R,
E1219V, Q1221H, H1264Y, A1320V, R1333K
A10T, I322V, S409I, E427G, R654L, K673E, V743I, R753G, E762G, M673I, N803S, N869S,
G1077D, R1114G, D1135N, V1139A, D1180G, E1219V, Q1221H, A1320V, R1333K
A10T, I322V, S409I, E427G, R654L, K673E, V743I, R753G, E762G, N803S, N869S, R1114G,
D1135N, E1219V, Q1221H, A1320V, R1333K

[0279] In some embodiments, the Cas9 protein comprises an amino acid sequence that is at least 80% identical to the amino acid sequence of a Cas9 protein as provided by any one of the variants of Table 1. In some embodiments, the Cas9 protein comprises an amino acid sequence that is at least 85%, at least 90%, at least 92%, at least 95%, at least 96%, at least 97%, at least 98%, at least 99%, or at least 99.5% identical to the amino acid sequence of a Cas9 protein as provided by any one of the variants of Table 1.

[0280] In some embodiments, the Cas9 protein exhibits an increased activity on a target sequence that does not comprise the canonical PAM (5′-NGG-3′) at its 3′ end as compared to Streptococcus pyogenes Cas9 as provided by SEQ ID NO: 326. In some embodiments, the Cas9 protein exhibits an activity on a target sequence having a 3′ end that is not directly adjacent to the canonical PAM sequence (5′-NGG-3′) that is at least 5-fold increased as compared to the activity of Streptococcus pyogenes Cas9 as provided by SEQ ID NO: 326 on the same target sequence. In some embodiments, the Cas9 protein exhibits an activity on a target sequence that is not directly adjacent to the canonical PAM sequence (5′-NGG-3′) that is at least 10-fold, at least 50-fold, at least 100-fold, at least 500-fold, at least 1,000-fold, at least 5,000-fold, at least 10,000-fold, at least 50,000-fold, at least 100,000-fold, at least 500,000-fold, or at least 1,000,000-fold increased as compared to the activity of Streptococcus pyogenes as provided by SEQ ID NO: 326 on the same target sequence. In some embodiments, the 3′ end of the target sequence is directly adjacent to an AAA, GAA, CAA, or TAA sequence. In some embodiments, the Cas9 protein comprises a combination of mutations that exhibit activity on a target sequence comprising a 5′-NAC-3″ PAM sequence at its 3′-end. In some embodiments, the combination of mutations is present in any one of the clones listed in Table 2. In some embodiments, the combination of mutations is conservative mutations of the clones listed in Table 2. In some embodiments, the Cas9 protein comprises the combination of mutations of any one of the Cas9 clones listed in Table 2.

TABLE 2
NAC PAM Clones
MUTATIONS FROM WILD-TYPE SPCAS9 (E.G., SEQ ID NO: 326)

T472I, R753G, K890E, D1332N, R1335Q, T1337N
I1057S, D1135N, P1301S, R1335Q, T1337N
T472I, R753G, D1332N, R1335Q, T1337N
D1135N, E1219V, D1332N, R1335Q, T1337N
T472I, R753G, K890E, D1332N, R1335Q, T1337N
I1057S, D1135N, P1301S, R1335Q, T1337N
T472I, R753G, D1332N, R1335Q, T1337N
T472I, R753G, Q771H, D1332N, R1335Q, T1337N
E627K, T638P, K652T, R753G, N803S, K959N, R1114G, D1135N, E1219V, D1332N, R1335Q,
T1337N
E627K, T638P, K652T, R753G, N803S, K959N, R1114G, D1135N, K1156E, E1219V, D1332N,
R1335Q, T1337N
E627K, T638P, V647I, R753G, N803S, K959N, G1030R, I1055E, R1114G, D1135N, E1219V,
D1332N, R1335Q, T1337N
E627K, E630G, T638P, V647A, G687R, N767D, N803S, K959N, R1114G, D1135N, E1219V,
D1332G, R1335Q, T1337N
E627K, T638P, R753G, N803S, K959N, R1114G, D1135N, E1219V, N1266H, D1332N, R1335Q,
T1337N
E627K, T638P, R753G, N803S, K959N, I1057T, R1114G, D1135N, E1219V, D1332N, R1335Q,
T1337N
E627K, T638P, R753G, N803S, K959N, R1114G, D1135N, E1219V, D1332N, R1335Q, T1337N
E627K, M631I, T638P, R753G, N803S, K959N, Y1036H, R1114G, D1135N, E1219V, D1251G,
D1332G, R1335Q, T1337N
E627K, T638P, R753G, N803S, V875I, K959N, Y1016C, R1114G, D1135N, E1219V, D1251G,
D1332G, R1335Q, T1337N, I1348V
K608R, E627K, T638P, V647I, R654L, R753G, N803S, T804A, K848N, V922A, K959N, R1114G,
D1135N, E1219V, D1332N, R1335Q, T1337N
K608R, E627K, T638P, V647I, R753G, N803S, V922A, K959N, K1014N, V1015A, R1114G,
D1135N, K1156N, E1219V, N1252D, D1332N, R1335Q, T1337N
K608R, E627K, R629G, T638P, V647I, A711T, R753G, K775R, K789E, N803S, K959N, V1015A,
Y1036H, R1114G, D1135N, E1219V, N1286H, D1332N, R1335Q, T1337N
K608R, E627K, T638P, V647I, T740A, R753G, N803S, K948E, K959N, Y1016S, R1114G,
D1135N, E1219V, N1286H, D1332N, R1335Q, T1337N
K608R, E627K, T638P, V647I, T740A, N803S, K948E, K959N, Y1016S, R1114G, D1135N,
E1219V, N1286H, D1332N, R1335Q, T1337N
I670S, K608R, E627K, E630G, T638P, V647I, R653K, R753G, I795L, K797N, N803S, K866R,
K890N, K959N, Y1016C, R1114G, D1135N, E1219V, D1332N, R1335Q, T1337N
K608R, E627K, T638P, V647I, T740A, G752R, R753G, K797N, N803S, K948E, K959N, V1015A,
Y1016S, R1114G, D1135N, E1219V, N1266H, D1332N, R1335Q, T1337N
I570T, A589V, K608R, E627K, T638P, V647I, R654L, Q716R, R753G, N803S, K948E, K959N,
Y1016S, R1114G, D1135N, E1207G, E1219V, N1234D, D1332N, R1335Q, T1337N
K608R, E627K, R629G, T638P, V647I, R654L, Q740R, R753G, N803S, K959N, N990S, T995S,
V1015A, Y1036D, R1114G, D1135N, E1207G, E1219V, N1234D, N1266H, D1332N, R1335Q,
T1337N
I562F, V565D, I570T, K608R, L625S, E627K, T638P, V647I, R654I, G752R, R753G, N803S,
N808D, K959N, M1021L, R1114G, D1135N, N1177S, N1234D, D1332N, R1335Q, T1337N
I562F, I570T, K608R, E627K, T638P, V647I, R753G, E790A, N803S, K959N, V1015A, Y1036H,
R1114G, D1135N, D1180E, A1184T, E1219V, D1332N, R1335Q, T1337N
I570T, K608R, E627K, T638P, V647I, R654H, R753G, E790A, N803S, K959N, V1015A, R1114G,
D1127A, D1135N, E1219V, D1332N, R1335Q, T1337N
I570T, K608R, L625S, E627K, T638P, V647I, R654I, T703P, R753G, N803S, N808D, K959N,
M1021L, R1114G, D1135N, E1219V, D1332N, R1335Q, T1337N
I570S, K608R, E627K, E630G, T638P, V647I, R653K, R753G, I795L, N803S, K866R, K890N,
K959N, Y1016C, R1114G, D1135N, E1219V, D1332N, R1335Q, T1337N
I570T, K608R, E627K, T638P, V647I, R654H, R753G, E790A, N803S, K959N, V1016A, R1114G,
D1135N, E1219V, K1246E, D1332N, R1335Q, T1337N
K608R, E627K, T638P, V647I, R654L, K673E, R753G, E790A, N803S, K948E, K959N, R1114G,
D1127G, D1135N, D1180E, E1219V, N1286H, D1332N, R1335Q, T1337N
K608R, L625S, E627K, T638P, V647I, R654I, I670T, R753G, N803S, N808D, K959N, M1021L,
R1114G, D1135N, E1219V, N1286H, D1332N, R1335Q, T1337N
E627K, M631V, T638P, V647I, K710E, R753G, N803S, N808D, K948E, M1021L, R1114G,
D1135N, E1219V, D1332N, R1335Q, T1337N, S1338T, H1349R

[0281] In some embodiments, the Cas9 protein comprises an amino acid sequence that is at least 80% identical to the amino acid sequence of a Cas9 protein as provided by any one of the variants of Table 2. In some embodiments, the Cas9 protein comprises an amino acid sequence that is at least 85%, at least 90%, at least 92%, at least 95%, at least 96%, at least 97%, at least 98%, at least 99%, or at least 99.5% identical to the amino acid sequence of a Cas9 protein as provided by any one of the variants of Table 2.

[0282] In some embodiments, the Cas9 protein comprises a combination of mutations that exhibit activity on a target sequence comprising a 5 ‘-NAT-3’ PAM sequence at its 3′-end. In some embodiments, the combination of mutations is present in any one of the clones listed in Table 3. In some embodiments, the combination of mutations is conservative mutations of the clones listed in Table 3. In some embodiments, the Cas9 protein comprises the combination of mutations of any one of the Cas9 clones listed in Table 3.

TABLE 3
NAT PAM Clones
MUTATIONS FROM WILD-TYPE SPCAS9 (E.G., SEQ ID NO: 326)

K961E, H985Y, D1135N, K1191N, E1219V, Q1221H, A1320A, P1321S, R1335L
D1135N, G1218S, E1219V, Q1221H, P1249S, P1321S, D1322G, R1335L
V743I, R753G, E790A, D1135N, G1218S, E1219V, Q1221H, A1227V, P1249S, N1286K, A1293T,
P1321S, D1322G, R1335L, T1339I
F575S, M631L, R654L, V748I, V743I, R753G, D853E, V922A, R1114G D1135N, G1218S,
E1219V, Q1221H, A1227V, P1249S, N1286K, A1293T, P1321S, D1322G, R1335L, T1339I
F575S, M631L, R654L, R664K, R753G, D853E, V922A, R1114G D1135N, D1180G, G1218S,
E1219V, Q1221H, P1249S, N1286K, P1321S, D1322G, R1335L
M631L, R654L, R753G, K797E, D853E, V922A, D1012A, R1114G D1135N, G1218S, E1219V,
Q1221H, P1249S, N1317K, P1321S, D1322G, R1335L
F575S, M631L, R654L, R664K, R753G, D853E, V922A, R1114G, Y1131C, D1135N, D1180G,
G1218S, E1219V, Q1221H, P1249S, P1321S, D1322G, R1335L
F575S, M631L, R654L, R664K, R753G, D853E, V922A, R1114G, Y1131C, D1135N, D1180G,
G1218S, E1219V, Q1221H, P1249S, P1321S, D1322G, R1335L
F575S, D596Y, M631L, R654L, R664K, R753G, D853E, V922A, R1114G, Y1131C, D1135N,
D1180G, G1218S, E1219V, Q1221H, P1249S, Q1256R, P1321S, D1322G, R1335L
F575S, M631L, R654L, R664K, K710E, V750A, R753G, D853E, V922A, R1114G, Y1131C,
D1135N, D1180G, G1218S, E1219V, Q1221H, P1249S, P1321S, D1322G, R1335L
F575S, M631L, K649R, R654L, R664K, R753G, D853E, V922A, R1114G, Y1131C, D1135N,
K1156E, D1180G, G1218S, E1219V, Q1221H, P1249S, P1321S, D1322G, R1335L
F575S, M631L, R654L, R664K, R753G, D853E, V922A, R1114G, Y1131C, D1135N, D1180G,
G1218S, E1219V, Q1221H, P1249S, P1321S, D1322G, R1335L
F575S, M631L, R654L, R664K, R753G, D853E, V922A, I1057G, R1114G, Y1131C, D1135N,
D1180G, G1218S, E1219V, Q1221H, P1249S, N1308D, P1321S, D1322G, R1335L
M631L, R654L, R753G, D853E, V922A, R1114G, Y1131C, D1135N, E1150V, D1180G, G1218S,
E1219V, Q1221H, P1249S, P1321S, D1332G, R1335L
M631L, R654L, R664K, R753G, D853E, I1057V, Y1131C, D1135N, D1180G, G1218S, E1219V,
Q1221H, P1249S, P1321S, D1332G, R1335L
M631L, R654L, R664K, R753G, I1057V, R1114G, Y1131C, D1135N, D1180G, G1218S, E1219V,
Q1221H, P1249S, P1321S, D1332G, R1335L

[0283] The above description of various napDNAbps which can be used in connection with the presently disclose adenine base editors is not meant to be limiting in any way. The adenine base editors may comprise the canonical SpCas9, or any ortholog Cas9 protein, or any variant Cas9 protein—including any naturally occurring variant, mutant, or otherwise engineered version of Cas9—that is known or which can be made or evolved through a directed evolutionary or otherwise mutagenic process. In various embodiments, the Cas9 or Cas9 variants have a nickase activity, i.e., only cleave of strand of the target DNA sequence. In other embodiments, the Cas9 or Cas9 variants have inactive nucleases, i.e., are “dead” Cas9 proteins. Other variant Cas9 proteins that may be used are those having a smaller molecular weight than the canonical SpCas9 (e.g., for easier delivery) or having modified or rearranged primary amino acid structure (e.g., the circular permutant formats). The adenine base editors described herein may also comprise Cas9 equivalents, including Cas12a/Cpf1 and Cas12b proteins which are the result of convergent evolution. The napDNAbps used herein (e.g., SpCas9, Cas9 variant, or Cas9 equivalents) may also may also contain various modifications that alter/enhance their PAM specifities. Lastly, the application contemplates any Cas9, Cas9 variant, or Cas9 equivalent which has at least 70%, at least 75%, at least 80%, at least 85%, at least 90%, at least 91%, at least 92%, at least 93%, at least 94%, at least 95%, at least 96%, at least 97%, at least 98%, at least 99%, or at least 99.9% sequence identity to a reference Cas9 sequence, such as a references SpCas9 canonical sequences or a reference Cas9 equivalent (e.g., Cas12a/Cpf1).

[0284] In a particular embodiment, the Cas9 variant having expanded PAM capabilities is SpCas9 (H840A) VRQR, or SpCas9-VRQR. In some embodiments, the disclosed base editors comprise a napDNAbp domain that has a sequence that is at least 90%, at least 95%, at least 98%, or at least 99% identical to SpCas9-VRQR. In some embodiments, the disclosed base editors comprise a napDNAbp domain that comprises SpCas9-VRQR. The SpCas9-VRQR comprises the following amino acid sequence (with the V, R, Q, R substitutions relative to the SpCas9 (H840A) of SEQ ID NO: 370 show, in bold underline. In addition, the methionine residue in SpCas9 (H840) was removed for SpCas9 (H840A) VRQR):

(SEQ ID NO: 406)
DKKYSIGLDIGTNSVGWAVITDEYKVPSKKFKVLGNTDRHSIKKNLIGAL
LFDSGETAEATRLKRTARRRYTRRKNRICYLQEIFSNEMAKVDDSFFHRL
EESFLVEEDKKHERHPIFGNIVDEVAYHEKYPTIYHLRKKLVDSTDKADL
RLIYLALAHMIKFRGHFLIEGDLNPDNSDVDKLFIQLVQTYNQLFEENPI
NASGVDAKAILSARLSKSRRLENLIAQLPGEKKNGLFGNLIALSLGLTPN
FKSNFDLAEDAKLQLSKDTYDDDLDNLLAQIGDQYADLFLAAKNLSDAIL
LSDILRVNTEITKAPLSASMIKRYDEHHQDLTLLKALVRQQLPEKYKEIF
FDQSKNGYAGYIDGGASQEEFYKFIKPILEKMDGTEELLVKLNREDLLRK
QRTFDNGSIPHQIHLGELHAILRRQEDFYPFLKDNREKIEKILTFRIPYY
VGPLARGNSRFAWMTRKSEETITPWNFEEVVDKGASAQSFIERMTNFDKN
LPNEKVLPKHSLLYEYFTVYNELTKVKYVTEGMRKPAFLSGEQKKAIVDL
LFKTNRKVTVKQLKEDYFKKIECFDSVEISGVEDRFNASLGTYHDLLKII
KDKDFLDNEENEDILEDIVLTLTLFEDREMIEERLKTYAHLFDDKVMKQL
KRRRYTGWGRLSRKLINGIRDKQSGKTILDFLKSDGFANRNFMQLIHDDS
LTFKEDIQKAQVSGQGDSLHEHIANLAGSPAIKKGILQTVKVVDELVKVM
GRHKPENIVIEMARENQTTQKGQKNSRERMKRIEEGIKELGSQILKEHPV
ENTQLQNEKLYLYYLQNGRDMYVDQELDINRLSDYDVDAIVPQSFLKDDS
IDNKVLTRSDKNRGKSDNVPSEEVVKKMKNYWRQLLNAKLITQRKFDNLT
KAERGGLSELDKAGFIKRQLVETRQITKHVAQILDSRMNTKYDENDKLIR
EVKVITLKSKLVSDFRKDFQFYKVREINNYHHAHDAYLNAVVGTALIKKY
PKLESEFVYGDYKVYDVRKMIAKSEQEIGKATAKYFFYSNIMNFFKTEIT
LANGEIRKRPLIETNGETGEIVWDKGRDFATVRKVLSMPQVNIVKKTEVQ
TGGFSKESILPKRNSDKLIARKKDWDPKKYGGFVSPTVAYSVLVVAKVEK
GKSKKLKSVKELLGITIMERSSFEKNPIDFLEAKGYKEVKKDLIIKLPKY
SLFELENGRKRMLASARELQKGNELALPSKYVNFLYLASHYEKLKGSPED
NEQKQLFVEQHKHYLDEIIEQISEFSKRVILADANLDKVLSAYNKHRDKP
IREQAENIIHLFTLTNLGAPAAFKYFDTTIDRKQYRSTKEVLDATLIHQS
ITGLYETRIDLSQLGGD

[0285] In another particular embodiment, the Cas9 variant having expanded PAM capabilities is SpCas9 (H840A) VRER, having the following amino acid sequence (with the V, R, E, R substitutions relative to the SpCas9 (H840A) of SEQ ID NO: 370 are shown in bold underline. In addition, the methionine residue in SpCas9 (H840) was removed for SpCas9 (H840A) VRER):

(SEQ ID NO: 407)
DKKYSIGLDIGTNSVGWAVITDEYKVPSKKFKVLGNTDRHSIKKNLIGAL
LFDSGETAEATRLKRTARRRYTRRKNRICYLQEIFSNEMAKVDDSFFHRL
EESFLVEEDKKHERHPIFGNIVDEVAYHEKYPTIYHLRKKLVDSTDKADL
RLIYLALAHMIKFRGHFLIEGDLNPDNSDVDKLFIQLVQTYNQLFEENPI
NASGVDAKAILSARLSKSRRLENLIAQLPGEKKNGLFGNLIALSLGLTPN
FKSNFDLAEDAKLQLSKDTYDDDLDNLLAQIGDQYADLFLAAKNLSDAIL
LSDILRVNTEITKAPLSASMIKRYDEHHQDLTLLKALVRQQLPEKYKEIF
FDQSKNGYAGYIDGGASQEEFYKFIKPILEKMDGTEELLVKLNREDLLRK
QRTFDNGSIPHQIHLGELHAILRRQEDFYPFLKDNREKIEKILTFRIPYY
VGPLARGNSRFAWMTRKSEETITPWNFEEVVDKGASAQSFIERMTNFDKN
LPNEKVLPKHSLLYEYFTVYNELTKVKYVTEGMRKPAFLSGEQKKAIVDL
LFKTNRKVTVKQLKEDYFKKIECFDSVEISGVEDRFNASLGTYHDLLKII
KDKDFLDNEENEDILEDIVLTLTLFEDREMIEERLKTYAHLFDDKVMKQL
KRRRYTGWGRLSRKLINGIRDKQSGKTILDFLKSDGFANRNFMQLIHDDS
LTFKEDIQKAQVSGQGDSLHEHIANLAGSPAIKKGILQTVKVVDELVKVM
GRHKPENIVIEMARENQTTQKGQKNSRERMKRIEEGIKELGSQILKEHPV
ENTQLQNEKLYLYYLQNGRDMYVDQELDINRLSDYDVDAIVPQSFLKDDS
IDNKVLTRSDKNRGKSDNVPSEEVVKKMKNYWRQLLNAKLITQRKFDNLT
KAERGGLSELDKAGFIKRQLVETRQITKHVAQILDSRMNTKYDENDKLIR
EVKVITLKSKLVSDFRKDFQFYKVREINNYHHAHDAYLNAVVGTALIKKY
PKLESEFVYGDYKVYDVRKMIAKSEQEIGKATAKYFFYSNIMNFFKTEIT
LANGEIRKRPLIETNGETGEIVWDKGRDFATVRKVLSMPQVNIVKKTEVQ
TGGFSKESILPKRNSDKLIARKKDWDPKKYGGFVSPTVAYSVLVVAKVEK
GKSKKLKSVKELLGITIMERSSFEKNPIDFLEAKGYKEVKKDLIIKLPKY
SLFELENGRKRMLASARELQKGNELALPSKYVNFLYLASHYEKLKGSPED
NEQKQLFVEQHKHYLDEIIEQISEFSKRVILADANLDKVLSAYNKHRDKP
IREQAENIIHLFTLTNLGAPAAFKYFDTTIDRKEYRSTKEVLDATLIHQS
ITGLYETRIDLSQLGGD

[0286] In another particular embodiment, the Cas9 variant having expanded PAM capabilities is SpCas9 (H840A) VQR, having the D10A, D1135V, R1335Q, and T1337R substitutions relative to the SpCas9 (H840A) of SEQ ID NO: 370. In addition, the methionine residue in SpCas9 (H840) was removed for SpCas9 (H840A) VQR):

(SEQ ID NO: 480)
MDKKYSIGLAIGTNSVGWAVITDEYKVPSKKFKVLGNTDRHSIKKNLIGA
LLFDSGETAEATRLKRTARRRYTRRKNRICYLQEIFSNEMAKVDDSFFHR
LEESFLVEEDKKHERHPIFGNIVDEVAYHEKYPTIYHLRKKLVDSTDKAD
LRLIYLALAHMIKFRGHFLIEGDLNPDNSDVDKLFIQLVQTYNQLFEENP
INASGVDAKAILSARLSKSRRLENLIAQLPGEKKNGLFGNLIALSLGLTP
NFKSNFDLAEDAKLQLSKDTYDDDLDNLLAQIGDQYADLFLAAKNLSDAI
LLSDILRVNTEITKAPLSASMIKRYDEHHQDLTLLKALVRQQLPEKYKEI
FFDQSKNGYAGYIDGGASQEEFYKFIKPILEKMDGTEELLVKLNREDLLR
KQRTFDNGSIPHQIHLGELHAILRRQEDFYPFLKDNREKIEKILTFRIPY
YVGPLARGNSRFAWMTRKSEETITPWNFEEVVDKGASAQSFIERMTNFDK
NLPNEKVLPKHSLLYEYFTVYNELTKVKYVTEGMRKPAFLSGEQKKAIVD
LLFKTNRKVTVKQLKEDYFKKIECFDSVEISGVEDRFNASLGTYHDLLKI
IKDKDFLDNEENEDILEDIVLTLTLFEDREMIEERLKTYAHLFDDKVMKQ
LKRRRYTGWGRLSRKLINGIRDKQSGKTILDFLKSDGFANRNFMQLIHDD
SLTFKEDIQKAQVSGQGDSLHEHIANLAGSPAIKKGILQTVKVVDELVKV
MGRHKPENIVIEMARENQTTQKGQKNSRERMKRIEEGIKELGSQILKEHP
VENTQLQNEKLYLYYLQNGRDMYVDQELDINRLSDYDVDHIVPQSFLKDD
SIDNKVLTRSDKNRGKSDNVPSEEVVKKMKNYWRQLLNAKLITQRKFDNL
TKAERGGLSELDKAGFIKRQLVETRQITKHVAQILDSRMNTKYDENDKLI
REVKVITLKSKLVSDFRKDFQFYKVREINNYHHAHDAYLNAVVGTALIKK
YPKLESEFVYGDYKVYDVRKMIAKSEQEIGKATAKYFFYSNIMNFFKTEI
TLANGEIRKRPLIETNGETGEIVWDKGRDFATVRKVLSMPQVNIVKKTEV
QTGGFSKESILPKRNSDKLIARKKDWDPKKYGGFVSPTVAYSVLVVAKVE
KGKSKKLKSVKELLGITIMERSSFEKNPIDFLEAKGYKEVKKDLIIKLPK
YSLFELENGRKRMLASAGELQKGNELALPSKYVNFLYLASHYEKLKGSPE
DNEQKQLFVEQHKHYLDEIIEQISEFSKRVILADANLDKVLSAYNKHRDK
PIREQAENIIHLFTLTNLGAPAAFKYFDTTIDRKQYRSTKEVLDATLIHQ
SITGLYETRIDLSQLGGD

[0287] In another particular embodiment, the Cas9 variant having expanded PAM capabilities is SpCas9 (H840A) EQR, having the D10A, D1135E, R1335Q, and T1337R substitutions relative to the SpCas9 (H840A) of SEQ ID NO: 370. In addition, the methionine residue in SpCas9 (H840) was removed for SpCas9 (H840A) EQR):

(SEQ ID NO: 481)
MDKKYSIGLAIGTNSVGWAVITDEYKVPSKKFKVLGNTDRHSIKKNLIGA
LLFDSGETAEATRLKRTARRRYTRRKNRICYLQEIFSNEMAKVDDSFFHR
LEESFLVEEDKKHERHPIFGNIVDEVAYHEKYPTIYHLRKKLVDSTDKAD
LRLIYLALAHMIKFRGHFLIEGDLNPDNSDVDKLFIQLVQTYNQLFEENP
INASGVDAKAILSARLSKSRRLENLIAQLPGEKKNGLFGNLIALSLGLTP
NFKSNFDLAEDAKLQLSKDTYDDDLDNLLAQIGDQYADLFLAAKNLSDAI
LLSDILRVNTEITKAPLSASMIKRYDEHHQDLTLLKALVRQQLPEKYKEI
FFDQSKNGYAGYIDGGASQEEFYKFIKPILEKMDGTEELLVKLNREDLLR
KQRTFDNGSIPHQIHLGELHAILRRQEDFYPFLKDNREKIEKILTFRIPY
YVGPLARGNSRFAWMTRKSEETITPWNFEEVVDKGASAQSFIERMTNFDK
NLPNEKVLPKHSLLYEYFTVYNELTKVKYVTEGMRKPAFLSGEQKKAIVD
LLFKTNRKVTVKQLKEDYFKKIECFDSVEISGVEDRFNASLGTYHDLLKI
IKDKDFLDNEENEDILEDIVLTLTLFEDREMIEERLKTYAHLFDDKVMKQ
LKRRRYTGWGRLSRKLINGIRDKQSGKTILDFLKSDGFANRNFMQLIHDD
SLTFKEDIQKAQVSGQGDSLHEHIANLAGSPAIKKGILQTVKVVDELVKV
MGRHKPENIVIEMARENQTTQKGQKNSRERMKRIEEGIKELGSQILKEHP
VENTQLQNEKLYLYYLQNGRDMYVDQELDINRLSDYDVDHIVPQSFLKDD
SIDNKVLTRSDKNRGKSDNVPSEEVVKKMKNYWRQLLNAKLITQRKFDNL
TKAERGGLSELDKAGFIKRQLVETRQITKHVAQILDSRMNTKYDENDKLI
REVKVITLKSKLVSDFRKDFQFYKVREINNYHHAHDAYLNAVVGTALIKK
YPKLESEFVYGDYKVYDVRKMIAKSEQEIGKATAKYFFYSNIMNFFKTEI
TLANGEIRKRPLIETNGETGEIVWDKGRDFATVRKVLSMPQVNIVKKTEV
QTGGFSKESILPKRNSDKLIARKKDWDPKKYGGFESPTVAYSVLVVAKVE
KGKSKKLKSVKELLGITIMERSSFEKNPIDFLEAKGYKEVKKDLIIKLPK
YSLFELENGRKRMLASAGELQKGNELALPSKYVNFLYLASHYEKLKGSPE
DNEQKQLFVEQHKHYLDEIIEQISEFSKRVILADANLDKVLSAYNKHRDK
PIREQAENIIHLFTLTNLGAPAAFKYFDTTIDRKQYRSTKEVLDATLIHQ
SITGLYETRIDLSQLGGD

[0288] In addition, any available methods may be utilized to obtain or construct a variant or mutant Cas9 protein. The term “mutation,” as used herein, refers to a substitution of a residue within a sequence, e.g., a nucleic acid or amino acid sequence, with another residue, or a deletion or insertion of one or more residues within a sequence. Mutations are typically described herein by identifying the original residue followed by the position of the residue within the sequence and by the identity of the newly substituted residue. Various methods for making the amino acid substitutions (mutations) provided herein are well known in the art, and are provided by, for example, Green and Sambrook, Molecular Cloning: A Laboratory Manual (4th ed., Cold Spring Harbor Laboratory Press, Cold Spring Harbor, N.Y. (2012)). Mutations can include a variety of categories, such as single base polymorphisms, microduplication regions, indel, and inversions, and is not meant to be limiting in any way. Mutations can include “loss-of-function” mutations which is the normal result of a mutation that reduces or abolishes a protein activity. Most loss-of-function mutations are recessive, because in a heterozygote the second chromosome copy carries an unmutated version of the gene coding for a fully functional protein whose presence compensates for the effect of the mutation. Mutations also embrace “gain-of-function” mutations, which is one which confers an abnormal activity on a protein or cell that is otherwise not present in a normal condition. Many gain-of-function mutations are in regulatory sequences rather than in coding regions, and can therefore have a number of consequences. For example, a mutation might lead to one or more genes being expressed in the wrong tissues, these tissues gaining functions that they normally lack. Because of their nature, gain-of-function mutations are usually dominant.

[0289] Mutations can be introduced into a reference Cas9 protein using site-directed mutagenesis. Older methods of site-directed mutagenesis known in the art rely on sub-cloning of the sequence to be mutated into a vector, such as an M13 bacteriophage vector, that allows the isolation of single-stranded DNA template. In these methods, one anneals a mutagenic primer (i.e., a primer capable of annealing to the site to be mutated but bearing one or more mismatched nucleotides at the site to be mutated) to the single-stranded template and then polymerizes the complement of the template starting from the 3′ end of the mutagenic primer. The resulting duplexes are then transformed into host bacteria and plaques are screened for the desired mutation. More recently, site-directed mutagenesis has employed PCR methodologies, which have the advantage of not requiring a single-stranded template. In addition, methods have been developed that do not require sub-cloning. Several issues must be considered when PCR-based site-directed mutagenesis is performed. First, in these methods it is desirable to reduce the number of PCR cycles to prevent expansion of undesired mutations introduced by the polymerase. Second, a selection must be employed in order to reduce the number of non-mutated parental molecules persisting in the reaction. Third, an extended-length PCR method is preferred in order to allow the use of a single PCR primer set. And fourth, because of the non-template-dependent terminal extension activity of some thermostable polymerases it is often necessary to incorporate an end-polishing step into the procedure prior to blunt-end ligation of the PCR-generated mutant product.

[0290] Any of the references noted above which relate to napDNAbp domains are hereby incorporated by reference in their entireties, if not already stated so.

### Base Editor Architectures Comprising a Nuclease Programmable DNA Binding Protein and an Adenosine Deaminase Domain

[0291] In some aspects, the disclosure provide base editors comprising a napDNAbp domain and an adenosine deaminase domain as described herein. The Cas9 domain may be any of the Cas9 domains or Cas9 proteins (e.g., a nCas9) provided herein. In some embodiments, any of the Cas9 domains or Cas9 proteins (e.g., nCas9) provided herein may be fused with any of the adenosine deaminases provided herein.

[0292] In some embodiments, the base editors comprising adenosine deaminases and a napDNAbp (e.g., Cas9 domain) do not include a linker sequence. In some embodiments, a linker is present between the adenosine deaminase domain and/or between an adenosine deaminase and the napDNAbp. In some embodiments, the “14” used in the general architecture above indicates the presence of an optional linker. In some embodiments, an adenosine deaminase domain and the napDNAbp domain are fused via any of the linkers provided herein. For example, in some embodiments the adenosine deaminase domain (which may include one or more adenosine deaminases) and the napDNAbp are fused via any of the linkers provided below in the section entitled “Linkers”. In certain embodiments, the base editors comprise an ABE7.10 (or ABEmax) architecture, which comprises NH₂—[NLS]-[first adenosine deaminase]-[second adenosine deaminase]-[napDNAbp domain]-[NLS]—COOH. In certain embodiments, the base editors comprise an ABE7.10 monomer architecture, which comprises NH₂—[NLS]-[adenosine deaminase]-[napDNAbp domain]-[NLS]—COOH.

[0293] In some embodiments, the base editors provided herein further comprise one or more nuclear targeting sequences, for example, a nuclear localization sequence (NLS). In some embodiments, a NLS comprises an amino acid sequence that facilitates the importation of a protein, that comprises an NLS, into the cell nucleus (e.g., by nuclear transport). In some embodiments, any of the base editors provided herein further comprise one or more nuclear localization sequences (NLSs). In certain embodiments, any of the base editors comprise two NLSs. In some embodiments, one or more of the NLSs are bipartite NLSs (“bpNLS”). In certain embodiments, the disclosed base editors comprise two bipartite NLSs. In some embodiments, the disclosed base editors comprise more than two bipartite NLSs.

[0294] In some embodiments, the NLS is fused to the N-terminus of the base editor. In some embodiments, the NLS is fused to the C-terminus of the base editor. In some embodiments, the NLS is fused to the C-terminus of the napDNAbp. In some embodiments, the NLS is fused to the N-terminus of the adenosine deaminase. In some embodiments, the NLS is fused to the C-terminus of the adenosine deaminase. In some embodiments, the NLS is fused to the base editor via one or more linkers. In some embodiments, the NLS is fused to the base editor without a linker.

[0295] In some embodiments, the NLS comprises an amino acid sequence of any one of the NLS sequences provided or referenced herein. In some embodiments, the NLS comprises an amino acid sequence as set forth in SEQ ID NO: 408 or SEQ ID NO: 409. Additional nuclear localization sequences are known in the art and would be apparent to the skilled artisan. For example, NLS sequences are described in Plank et al., PCT/EP2000/011690, the contents of which are incorporated herein by reference for their disclosure of exemplary nuclear localization sequences. In some embodiments, a NLS comprises the amino acid sequence PKKKRKV (SEQ ID NO: 408), MDSLLMNRRKFLYQFKNVRWAKGRRETYLC (SEQ ID NO: 409), KRTADGSEFESPKKKRKV (SEQ ID NO: 410), or KRTADGSEFEPKKKRKV (SEQ ID NO: 411). In other embodiments, the NLS comprises the amino acid sequence:

(SEQ ID NO: 482)
NLSKRPAAIKKAGQAKKKK,
(SEQ ID NO: 483)
PAAKRVKLD,
(SEQ ID NO: 484)
RQRRNELKRSF,
or
(SEQ ID NO: 485)
NQSSNFGPMKGGNFGGRSSGPYGGGGQYFAKPRNQGGY.

[0296] In some embodiments, the base editors provided herein do not comprise a linker. In some embodiments, a linker is present between one or more of the domains or proteins (e.g., adenosine deaminase, napDNAbp, and/or NLS). In some embodiments, the “]-[” used in the general architecture above indicates the presence of an optional linker.

[0297] In some embodiments, the general architecture of exemplary base editors with a first adenosine deaminase, a second adenosine deaminase, and a napDNAbp domain comprises any one of the following structures, where NLS is a nuclear localization sequence (e.g., any NLS provided herein), NH₂ is the N-terminus of the base editor, and COOH is the C-terminus of the base editor.

[0298] In some embodiments, the general architecture of exemplary base editors comprising an adenosine deaminase domain and a napDNAbp: NH₂-[adenosine deaminase]-[napDNAbp domain]-COOH; or NH₂-[napDNAbp domain]-[adenosine deaminase]-COOH.

[0299] In some embodiments, the architecture of exemplary base editors comprise an adenosine deaminase domain that comprises a dimer of a first adenosine deaminase and a second adenosine deaminase: NH₂-[first adenosine deaminase]-[second adenosine deaminase]-[napDNAbp domain]-COOH; NH₂-[first adenosine deaminase]-[napDNAbp domain]-[second adenosine deaminase]-COOH; NH₂-[napDNAbp domain]-[first adenosine deaminase]-[second adenosine deaminase]-COOH; NH₂-[second adenosine deaminase]-[first adenosine deaminase]-[napDNAbp domain]-COOH; NH₂-[second adenosine deaminase]-[napDNAbp domain]-[first adenosine deaminase]-COOH; or NH₂-[napDNAbp domain]-[second adenosine deaminase]-[first adenosine deaminase]-COOH.

[0300] In particular embodiments, the disclosure provides a base editor comprising the architecture NH₂-[first adenosine deaminase]-[second adenosine deaminase]-[napDNAbp domain]-[NLS]—COOH.

[0301] Exemplary base editors comprising an adenosine deaminase, a napDNAbp domain, and an NLS, where NLS is a nuclear localization sequence (e.g., any NLS provided herein) may have the following architecture:
[0302] NH₂-[adenosine deaminase]-[napDNAbp domain]-[NLS]—COOH;
[0303] NH₂-[napDNAbp domain]-[adenosine deaminase]-[NLS]—COOH;
[0304] NH₂—[NLS]-[adenosine deaminase]-[napDNAbp domain]-COOH; or
[0305] NH₂—[NLS]-[napDNAbp domain]-[adenosine deaminase]-COOH.

[0306] Exemplary base editors comprising a first adenosine deaminase, a second adenosine deaminase, a napDNAbp domain, and an NLS, where NLS is a nuclear localization sequence (e.g., any NLS provided herein) may have the following architecture: NH₂—[NLS]-[first adenosine deaminase]-[second adenosine deaminase]-[napDNAbp domain]-COOH;
[0307] NH₂-[first adenosine deaminase]-[NLS]-[second adenosine deaminase]-[napDNAbp domain]-COOH;
[0308] NH₂-[first adenosine deaminase]-[second adenosine deaminase]-[NLS]-[napDNAbp domain]-COOH;
[0309] NH₂-[first adenosine deaminase]-[second adenosine deaminase]-[napDNAbp domain]-[NLS]—COOH;
[0310] NH₂— [NLS]-[first adenosine deaminase]-[napDNAbp domain]-[second adenosine deaminase]-COOH;
[0311] NH₂-[first adenosine deaminase]-[NLS]-[napDNAbp domain]-[second adenosine deaminase]-COOH;
[0312] NH₂-[first adenosine deaminase]-[napDNAbp domain]-[NLS]-[second adenosine deaminase]-COOH;
[0313] NH₂-[first adenosine deaminase]-[napDNAbp domain]-[second adenosine deaminase]-[NLS]—COOH;
[0314] NH₂—[NLS]-[napDNAbp domain]-[first adenosine deaminase]-[second adenosine deaminase]-COOH;
[0315] NH₂-[napDNAbp domain]-[NLS]-[first adenosine deaminase]-[second adenosine deaminase]-COOH;
[0316] NH₂-[napDNAbp domain]-[first adenosine deaminase]-[NLS]-[second adenosine deaminase]-COOH;
[0317] NH₂-[napDNAbp domain]-[first adenosine deaminase]-[second adenosine deaminase]-[NLS]—COOH;
[0318] NH₂—[NLS]-[second adenosine deaminase]-[first adenosine deaminase]-[napDNAbp domain]-COOH;
[0319] NH₂-[second adenosine deaminase]-[NLS]-[first adenosine deaminase]-[napDNAbp domain]-COOH;
[0320] NH₂-[second adenosine deaminase]-[first adenosine deaminase]-[NLS]-[napDNAbp domain]-COOH;
[0321] NH₂-[second adenosine deaminase]-[first adenosine deaminase]-[napDNAbp domain]-[NLS]—COOH;
[0322] NH₂—[NLS]-[second adenosine deaminase]-[napDNAbp domain]-[first adenosine deaminase]-COOH;
[0323] NH₂-[second adenosine deaminase]-[NLS]-[napDNAbp domain]-[first adenosine deaminase]-COOH;
[0324] NH₂-[second adenosine deaminase]-[napDNAbp domain]-[NLS]-[first adenosine deaminase]-COOH;
[0325] NH₂-[second adenosine deaminase]-[napDNAbp domain]-[first adenosine deaminase]-[NLS]—COOH;
[0326] NH₂—[NLS]-[napDNAbp domain]-[second adenosine deaminase]-[first adenosine deaminase]-COOH;
[0327] NH₂-[napDNAbp domain]-[NLS]-[second adenosine deaminase]-[first adenosine deaminase]-COOH;
[0328] NH₂-[napDNAbp domain]-[second adenosine deaminase]-[NLS]-[first adenosine deaminase]-COOH; or
[0329] NH₂-[napDNAbp domain]-[second adenosine deaminase]-[first adenosine deaminase]-[NLS]—COOH.

[0330] Exemplary base editors comprising a first adenosine deaminase, a second adenosine deaminase, a napDNAbp domain, and two NLSs may have the following architecture:
[0331] NH₂—[NLS]-[adenosine deaminase]-[napDNAbp domain]-[NLS]—COOH;
[0332] NH₂—[NLS]-[napDNAbp domain]-[adenosine deaminase]-[NLS]—COOH;
[0333] NH₂—[NLS]-[adenosine deaminase]-[napDNAbp domain]-[NLS]—COOH; or
[0334] NH₂—[NLS]-[napDNAbp domain]-[adenosine deaminase]-[NLS]—COOH.

[0335] Other exemplary base editors comprising a first adenosine deaminase, a second adenosine deaminase, a napDNAbp domain, and two NLSs may have the following architecture:
[0336] NH₂—[NLS]-[first adenosine deaminase]-[second adenosine deaminase]-[napDNAbp domain]-[NLS]—COOH;
[0337] NH₂—[NLS]-[second adenosine deaminase]-[first adenosine deaminase]-[napDNAbp domain]-[NLS]—COOH;
[0338] NH₂—[NLS]-[napDNAbp domain]-[first adenosine deaminase]-[second adenosine deaminase]-[NLS]—COOH;
[0339] NH₂—[NLS]-[napDNAbp domain]-[second adenosine deaminase]-[first adenosine deaminase]-[NLS]—COOH;
[0340] NH₂—[NLS]-[first adenosine deaminase]-[napDNAbp domain]-[second adenosine deaminase]-[NLS]—COOH;
[0341] NH₂—[NLS]-[second adenosine deaminase]-[napDNAbp domain]-[first adenosine deaminase]-[NLS]—COOH;
[0342] NH₂—[NLS]-[first adenosine deaminase]-[second adenosine deaminase]-[napDNAbp domain]-[NLS]—COOH;
[0343] NH₂—[NLS]-[second adenosine deaminase]-[first adenosine deaminase]-[napDNAbp domain]-[NLS]—COOH;
[0344] NH₂—[NLS]-[napDNAbp domain]-[first adenosine deaminase]-[second adenosine deaminase]-[NLS]—COOH;
[0345] NH₂—[NLS]-[napDNAbp domain]-[second adenosine deaminase]-[first adenosine deaminase]-[NLS]—COOH;
[0346] NH₂—[NLS]-[first adenosine deaminase]-[napDNAbp domain]-[second adenosine deaminase]-[NLS]—COOH; or
[0347] NH₂—[NLS]-[second adenosine deaminase]-[napDNAbp domain]-[first adenosine deaminase]-[NLS]—COOH.

[0348] In particular embodiments, the disclosed base editors comprise the architecture: NH₂-[bpNLS]-[TadA-8e]-[napDNAbp domain]-[bpNLS]—COOH;
[0349] NH₂-[bpNLS]-[napDNAbp domain]-[TadA-8e]-[bpNLS]—COOH;
[0350] NH₂-[bpNLS]-[TadA-8e]-[napDNAbp domain]-[bpNLS]—COOH;
[0351] NH₂-[bpNLS]-[napDNAbp domain]-[TadA-8e]-[bpNLS]—COOH;
[0352] NH₂-[bpNLS]-[wt ecTadA]-[TadA-8e]-[napDNAbp domain]-[bpNLS]—COOH;
[0353] NH₂-[bpNLS]-[TadA-8e]-[wt ecTadA]-[napDNAbp domain]-[bpNLS]—COOH;
[0354] NH₂-[bpNLS]-[napDNAbp domain]-[wt ecTadA]-[TadA-8e]-[bpNLS]—COOH;
[0355] NH₂-[bpNLS]-[napDNAbp domain]-[TadA-8e]-[wt ecTadA]-[bpNLS]—COOH;
[0356] NH₂-[bpNLS]-[wt ecTadA]-[napDNAbp domain]-[TadA-8e]-[bpNLS]—COOH;
[0357] NH₂-[bpNLS]-[TadA-8e]-[napDNAbp domain]-[wt ecTadA]-[bpNLS]—COOH;
[0358] NH₂-[bpNLS]-[wt ecTadA]-[TadA-8e]-[napDNAbp domain]-[bpNLS]—COOH;
[0359] NH₂-[bpNLS]-[TadA-8e]-[wt ecTadA]-[napDNAbp domain]-[bpNLS]—COOH;
[0360] NH₂-[bpNLS]-[napDNAbp domain]-[wt ecTadA]-[TadA-8e]-[bpNLS]—COOH;
[0361] NH₂-[bpNLS]-[napDNAbp domain]-[TadA-8e]-[wt ecTadA]-[bpNLS]—COOH;
[0362] NH₂-[bpNLS]-[wt ecTadA]-[napDNAbp domain]-[TadA-8e]-[bpNLS]—COOH; or
[0363] NH₂-[bpNLS]-[TadA-8e]-[napDNAbp domain]-[wt ecTadA]-[bpNLS]—COOH.

[0364] A representative nuclear localization signal is a peptide sequence that directs the protein to the nucleus of the cell in which the sequence is expressed. A nuclear localization signal is predominantly basic, can be positioned almost anywhere in a protein's amino acid sequence, generally comprises a short sequence of four amino acids (Autieri & Agrawal, (1998) J. Biol. Chem. 273: 14731-37, incorporated herein by reference) to eight amino acids, and is typically rich in lysine and arginine residues (Magin et al., (2000) Virology 274: 11-16, incorporated herein by reference). Nuclear localization signals often comprise proline residues. A variety of nuclear localization signals have been identified and have been used to effect transport of biological molecules from the cytoplasm to the nucleus of a cell. See, e.g., Tinland et al., (1992) Proc. Natl. Acad. Sci. U.S.A. 89:7442-46; Moede et al., (1999) FEBS Lett. 461:229-34, which is incorporated herein by reference. Translocation is currently thought to involve nuclear pore proteins.

[0365] Most NLSs can be classified in three general groups: (i) a monopartite NLS exemplified by the SV40 large T antigen NLS (PKKKRKV (SEQ ID NO: 408)); (ii) a bipartite motif consisting of two basic domains separated by a variable number of spacer amino acids and exemplified by the Xenopus nucleoplasmin NLS (KRXXXXXXXXXXKKKL (SEQ ID NO: 486)); and (iii) noncanonical sequences such as M9 of the hnRNP A1 protein, the influenza virus nucleoprotein NLS, and the yeast Gal4 protein NLS (Dingwall and Laskey, Trends Biochem Sci. 1991 December; 16(12):478-81).

[0366] Nuclear localization signals appear at various points in the amino acid sequences of proteins. NLSs have been identified at the N-terminus, the C-terminus, and in the central region of proteins. Thus, the specification provides base editors that may be modified with one or more NLSs at the C-terminus, the N-terminus, as well as at in internal region of the base editor. The residues of a longer sequence that do not function as component NLS residues should be selected so as not to interfere, for example tonically or sterically, with the nuclear localization signal itself. Therefore, although there are no strict limits on the composition of an NLS-comprising sequence, in practice, such a sequence can be functionally limited in length and composition.

[0367] The present disclosure contemplates any suitable means by which to modify a fusion protein (or base editor) to include one or more NLSs. In one aspect, the base editors can be engineered to express a fusion protein that is translationally fused at its N-terminus or its C-terminus (or both) to one or more NLSs, i.e., to form a fusion protein-NLS fusion construct. In other embodiments, the fusion protein-encoding nucleotide sequence can be genetically modified to incorporate a reading frame that encodes one or more NLSs in an internal region of the encoded fusion protein. In addition, the NLSs may include various amino acid linkers or spacer regions encoded between the fusion protein and the N-terminally, C-terminally, or internally-attached NLS amino acid sequence. Thus, the present disclosure also provides for nucleotide constructs, vectors, and host cells for expressing base editors that comprise a fusion protein and one or more NLSs.

[0368] The base editors described herein may also comprise nuclear localization signals which are linked to a fusion protein through one or more linkers, e.g., polymeric, amino acid, polysaccharide, chemical, or nucleic acid linker element. In certain embodiments, the NLS is linked to a fusion protein using an XTEN linker, as set forth in SEQ ID NO: 412. The linkers within the contemplated scope of the disclosure are not intended to have any limitations and can be any suitable type of molecule (e.g., polymer, amino acid, polysaccharide, nucleic acid, lipid, or any synthetic chemical linker domain) and be joined to the fusion protein by any suitable strategy that effectuates forming a bond (e.g., covalent linkage, hydrogen bonding) between the fusion protein and the one or more NLSs.

[0369] The base editors described herein also may include one or more additional elements. In certain embodiments, an additional element may comprise an effector of base repair, such as an inhibitor of base repair.

[0370] In some embodiments, the base editors described herein may comprise one or more heterologous protein domains (e.g., about or more than about 1, 2, 3, 4, 5, 6, 7, 8, 9, 10, or more domains in addition to the base editors components). A base editor may comprise any additional protein sequence, and optionally a linker sequence between any two domains. Other exemplary features that may be present are localization sequences, such as cytoplasmic localization sequences, export sequences, such as nuclear export sequences, or other localization sequences, as well as sequence tags.

[0371] Examples of heterologous protein domains that may be fused to a base editor or component thereof (e.g., the napDNAbp domain, the nucleotide modification domain, or the NLS domain) include, without limitation, epitope tags and reporter gene sequences. Non-limiting examples of epitope tags include histidine (His) tags, V5 tags, FLAG tags, influenza hemagglutinin (HA) tags, Myc tags, VSV-G tags, and thioredoxin (Trx) tags. Examples of reporter genes include, but are not limited to, glutathione-5-transferase (GST), horseradish peroxidase (HRP), chloramphenicol acetyltransferase (CAT), beta-galactosidase, beta-glucuronidase, luciferase, green fluorescent protein (GFP), HcRed, DsRed, cyan fluorescent protein (CFP), yellow fluorescent protein (YFP), and autofluorescent proteins including blue fluorescent protein (BFP). A base editor may be fused to a gene sequence encoding a protein or a fragment of a protein that binds DNA molecules or binds other cellular molecules, including, but not limited to, maltose binding protein (MBP), S-tag, Lex A DNA binding domain (DBD) fusions, GAL4 DNA binding domain fusions, and herpes simplex virus (HSV) BP16 protein fusions. Additional domains that may form part of a base editor are described in US Patent Publication No. 2011/0059502, published Mar. 10, 2011, and incorporated herein by reference in its entirety.

[0372] In an aspect of the disclosure, a reporter gene which includes, but is not limited to, glutathione-5-transferase (GST), horseradish peroxidase (HRP), chloramphenicol acetyltransferase (CAT) beta-galactosidase, beta-glucuronidase, luciferase, green fluorescent protein (GFP), HcRed, DsRed, cyan fluorescent protein (CFP), yellow fluorescent protein (YFP), and autofluorescent proteins including blue fluorescent protein (BFP), may be introduced into a cell to encode a gene product which serves as a marker by which to measure the alteration or modification of expression of the gene product. In certain embodiments of the disclosure the gene product is luciferase. In a further embodiment of the disclosure the expression of the gene product is decreased.

[0373] Other exemplary features that may be present are tags that are useful for solubilization, purification, or detection of the base editor. Suitable protein tags provided herein include, but are not limited to, biotin carboxylase carrier protein (BCCP) tags, myc-tags, calmodulin-tags, FLAG-tags, hemagglutinin (HA)-tags, bgh-PolyA tags, polyhistidine tags, and also referred to as histidine tags or His-tags, maltose binding protein (MBP)-tags, nus-tags, glutathione-S-transferase (GST)-tags, green fluorescent protein (GFP)-tags, thioredoxin-tags, S-tags, Softags (e.g., Softag 1, Softag 3), strep-tags, biotin ligase tags, FlAsH tags, V5 tags, and SBP-tags. Additional suitable sequences will be apparent to those of skill in the art. In some embodiments, the base editor comprises one or more His tags.

### Linkers

[0374] In certain embodiments, linkers may be used to link any of the peptides or peptide domains or domains of the base editor (e.g., a napDNAbp domain covalently linked to an adenosine deaminase domain which is covalently linked to an NLS domain). The base editors described herein may comprise linkers of 32 amino acids in length.

[0375] The linker may be as simple as a covalent bond, or it may be a polymeric linker many atoms in length. In certain embodiments, the linker is a polypeptide or based on amino acids. In other embodiments, the linker is not peptide-like. In certain embodiments, the linker is a covalent bond (e.g., a carbon-carbon bond, disulfide bond, carbon-heteroatom bond, etc.). In certain embodiments, the linker is a carbon-nitrogen bond of an amide linkage. In certain embodiments, the linker is a cyclic or acyclic, substituted or unsubstituted, branched or unbranched aliphatic or heteroaliphatic linker. In certain embodiments, the linker is polymeric (e.g., polyethylene, polyethylene glycol, polyamide, polyester, etc.). In certain embodiments, the linker comprises a monomer, dimer, or polymer of aminoalkanoic acid. In certain embodiments, the linker comprises an aminoalkanoic acid (e.g., glycine, ethanoic acid, alanine, beta-alanine, 3-aminopropanoic acid, 4-aminobutanoic acid, 5-pentanoic acid, etc.). In certain embodiments, the linker comprises a monomer, dimer, or polymer of aminohexanoic acid (Ahx). In certain embodiments, the linker is based on a carbocyclic moiety (e.g., cyclopentane, cyclohexane). In other embodiments, the linker comprises a polyethylene glycol moiety (PEG). In other embodiments, the linker comprises amino acids. In certain embodiments, the linker comprises a peptide. In certain embodiments, the linker comprises an aryl or heteroaryl moiety. In certain embodiments, the linker is based on a phenyl ring. The linker may include functionalized moieties to facilitate attachment of a nucleophile (e.g., thiol, amino) from the peptide to the linker. Any electrophile may be used as part of the linker. Exemplary electrophiles include, but are not limited to, activated esters, activated amides, Michael acceptors, alkyl halides, aryl halides, acyl halides, and isothiocyanates.

[0376] In some embodiments, the linker is 5-100 amino acids in length, for example, 5, 6, 7, 8, 9, 10, 11, 12, 13, 14, 15, 16, 17, 18, 19, 20, 21, 22, 23, 24, 25, 26, 27, 28, 29, 30, 31, 32, 33, 34, 35-40, 40-45, 45-50, 50-60, 60-70, 70-80, 80-90, 90-100, 100-110, 110-120, 120-130, 130-140, 140-150, or 150-200 amino acids in length. Longer or shorter linkers are also contemplated. In some embodiments, the linker is 32 amino acids in length. In exemplary embodiments, the linker comprises the 32-amino acid sequence SGGSSGGSSGSETPGTSESATPESSGGSSGGS (SEQ ID NO: 412), also known as an XTEN linker. In some embodiments, the linker comprises the 9-amino acid sequence SGGSGGSGGS (SEQ ID NO: 413). In some embodiments, the linker comprises the 4-amino acid sequence SGGS (SEQ ID NO: 414).

[0377] In some embodiments, the linker comprises the amino acid sequence (GGGGS)ₙ (SEQ ID NO: 415), (G)ₙ (SEQ ID NO: 416), (EAAAK)ₙ (SEQ ID NO: 417), (GGS)ₙ (SEQ ID NO: 418), (SGGS)ₙ (SEQ ID NO: 419), (XP)ₙ (SEQ ID NO: 420), or any combination thereof, wherein n is independently an integer between 1 and 30, and wherein X is any amino acid. In some embodiments, the linker comprises the amino acid sequence (GGS)ₙ (SEQ ID NO: 421), wherein n is 1, 3, or 7. In some embodiments, the linker comprises the amino acid sequence SGSETPGTSESATPES (SEQ ID NO: 422).

[0378] In some embodiments, a linker comprises SGSETPGTSESATPES (SEQ ID NO: 422), and SGGS (SEQ ID NO: 413). In some embodiments, a linker comprises SGGSSGSETPGTSESATPESSGGS (SEQ ID NO: 423). In some embodiments, a linker comprises SGGSSGGSSGSETPGTSESATPESSGGSSGGS (SEQ ID NO: 412). In some embodiments, a linker comprises GGSGGSPGSPAGSPTSTEEGTSESATPESGPGTSTEPSEGSAPGSPAGSPTSTEEGTSTEPSE GSAPGTSTEPSEGSAPGTSESATPESGPGSEPATSGGSGGS (SEQ ID NO: 424). In some embodiments, the linker is 24 amino acids in length. In some embodiments, the linker comprises the amino acid sequence SGGSSGGSSGSETPGTSESATPES (SEQ ID NO: 425). In some embodiments, the linker is 40 amino acids in length. In some embodiments, the linker comprises the amino acid sequence SGGSSGGSSGSETPGTSESATPESSGGSSGGSSGGSSGGS (SEQ ID NO: 426). In some embodiments, the linker is 64 amino acids in length. In some embodiments, the linker comprises the amino acid sequence SGGSSGGSSGSETPGTSESATPESSGGSSGGSSGGSSGGSSGSETPGTSESATPESSGGSSG GS (SEQ ID NO: 427). In some embodiments, the linker is 92 amino acids in length. In some embodiments, the linker comprises the amino acid sequence PGSPAGSPTSTEEGTSESATPESGPGTSTEPSEGSAPGSPAGSPTSTEEGTSTEPSEGSAPGT STEPSEGSAPGTSESATPESGPGSEPATS (SEQ ID NO: 428). It should be appreciated that any of the linkers provided herein may be used to link a first adenosine deaminase and a second adenosine deaminase; an adenosine deaminase domain (comprising, e.g., a first and/or a second adenosine deaminase) and a napDNAbp; a napDNAbp and an NLS; or an adenosine deaminase domain and an NLS.

[0379] In some embodiments, any of the base editors provided herein, comprise an adenosine deaminase and a napDNAbp that are fused to each other via a linker. In some embodiments, any of the base editors provided herein, comprise a first adenosine deaminase and a second adenosine deaminase that are fused to each other via a linker. In some embodiments, any of the base editors provided herein, comprise an NLS, which may be fused to an adenosine deaminase (e.g., a first and/or a second adenosine deaminase) and a nucleic acid programmable DNA binding protein (napDNAbp). Various linker lengths and flexibilities between an adenosine deaminase (e.g., an engineered ecTadA) and a napDNAbp (e.g., a Cas9 domain), and/or between a first adenosine deaminase and a second adenosine deaminase may be employed (e.g., ranging from very flexible linkers of the form of SEQ ID NOs: 119, 121-124 (see, e.g., Guilinger J P, Thompson D B, Liu D R. Fusion of catalytically inactive Cas9 to Fokl nuclease improves the specificity of genome modification. Nat. Biotechnol. 2014; 32(6): 577-82; the entire contents are incorporated herein by reference) and (XP)ₙ (SEQ ID NO: 420)) in order to achieve the optimal length for deaminase activity for the specific application. In some embodiments, n is 1, 2, 3, 4, 5, 6, 7, 8, 9, 10, 11, 12, 13, 14, or 15. In some embodiments, the linker comprises a (GGS)ₙ (SEQ ID NO: 421) motif, wherein n is 1, 3, or 7. In some embodiments, the adenosine deaminase and the napDNAbp, and/or the first adenosine deaminase and the second adenosine deaminase of any of the base editors provided herein are fused via a linker comprising an amino acid sequence selected from SEQ ID NOs: 119-132. In some embodiments, the linker is 24 amino acids in length. In some embodiments, the linker comprises the amino acid sequence (SGGS)₂-SGSETPGTSESATPES-(SGGS)₂ (SEQ ID NO: 412), which may also be referred to as (SGGS)₂-XTEN-(SGGS)₂ (SEQ ID NO: 429). In some embodiments, the linker comprises the amino acid sequence, wherein n is 0, 1, 2, 3, 4, 5, 6, 7, 8, 9, or 10. In some embodiments, the linker is 40 amino acids in length. In some embodiments, the linker is 64 amino acids in length. In some embodiments, the linker is 92 amino acids in length.

### Exemplary Adenine Base Editors

[0380] Some aspects of the disclosure provide base editors comprising an adenine base editor comprising a napDNAbp domain (e.g. an nCas9 domain) and an adenosine deaminase domain (e.g., a heterodimer of adenosine deaminases). In some embodiments, the base editors comprise adenine base editors for multiplexing applications. In still other embodiments, the base editors comprise ancestrally reconstructed adenine base editors.

[0381] The present disclosure provides newly discovered mutations in TadA 7.10 (SEQ ID NO: 315) (the TadA* used in ABEmax) that yield adenosine deaminase variants and confer broader Cas compatibility to the deaminase (see FIG. 2A). In certain embodiments, these mutations confer reduced off-target effects, such as reduced RNA editing activity and off-target DNA editing activity, on the adenine base editor. The adenine base editors of the present disclosure comprise one or more of the disclosed adenosine deaminase variants. In other embodiments, the adenine base editors may comprise one or more adenosine deaminases having two or more such substitutions in combination. In some embodiments, the adenine base editors comprise adenosine deaminases comprising comprises a sequence with at least 80%, 85%, 90%, 95%, 98%, 99%, or 99.5% sequence identity to SEQ ID NO: 433 (TadA-8e).

[0382] In some embodiments, the adenine base editor of the disclosure comprises an amino acid sequence that is at least 80%, 85%, 90%, 95%, 98%, 99%, or 99.5% identical to the amino acid sequence of any one of SEQ ID NOs: 169-188, 449-462, and 465-476. In particular embodiments, the adenine base editor of the disclosure comprises any one of the sequences set forth as SEQ ID NOs: 169-188, 449-462, and 465-476.

[0383] In some embodiments, the adenine base editor of the disclosure comprises the sequence of SEQ ID NO: 138. In some embodiments, the adenine base editor of the disclosure comprises the sequence of SEQ ID NO: 142. In other embodiments, the adenine base editor of the disclosure comprises a sequence selected from SEQ ID NOs: 143-146. In other embodiments, the adenine base editor of the disclosure comprises the sequence of SEQ ID NO: 147. In other embodiments, the adenine base editor of the disclosure comprises the sequence of SEQ ID NOs: 148 or 149. In other embodiments, the adenine base editors of the disclosure comprises the sequence of SEQ ID NOs: 171 or 172. In other embodiments, the adenine base editor of the disclosure comprises the sequence of SEQ ID NOs: 183 or 185. In other embodiments, the adenine base editor of the disclosure comprises the sequence of SEQ ID NO: 469 or SEQ ID NO: 453.

[0384] In some embodiments, any of the adenine base editors described herein may comprise an amino acid sequence having 1, 2, 3, 4, 5, 6, 7, 8, 9, 10, 11, 12, 13, 14, 15, 16, 17, 18, 19, 20, 25, 30, or more than 30 amino acids that differ relative to the amino acid sequence of any of SEQ ID NOs: 169-188, 449-462, and 465-476. These differences may comprise amino acids that have been inserted, deleted, or substituted relative to the reference sequence. In some embodiments, the disclosed adenosine deaminase domains contain stretches of about 50, about 75, about 100, about 125, about 150, about 175, about 200, about 300, about 400, about 500, or more than 500 consecutive amino acids in common with either of SEQ ID NOs: 169-188, 449-462, and 465-476.

[0385] Exemplary adenine base editors of this disclosure comprise the monomer and dimer versions of the following editors: ABE8e, SaABE8e, SaKKH-ABE8e, NG-ABE8e, ABE-xCas9, ABE8e-NRTH, ABE8e-NRRH, ABE8e-NRCH, ABE8e-NG-CP1041, ABE8e-VRQR-CP1041, ABE8e-CP1041, ABE8e-CP1028, ABE8e-VRQR, ABE8e-LbCas12a (LbABE8e), ABE8e-AsCas12a (enAsABE8e), ABE8e-SpyMac, ABE8e (TadA-8e V106W), ABE8e (K20A,R21A), and ABE8e(TadA-8e V82G). The monomer version refers to an editor having an adenosine deaminase domain that comprises a TadA8e and does not comprise a second adenosine deaminase enzyme. The dimer version refers to an editor having an adenosine deaminase domain that comprises a first and second adenosine deaminase, i.e., a wild-type TadA enzyme and a TadA8e enzyme.

[0386] Exemplary base editors comprise sequences that are at least 85%, at least 90%, at least 95%, at least 98%, at least 99%, or at least 99.5% identical to any of the following amino acid sequences:

ABEmax, or ABE7.10
(SEQ ID NO: 487)
MSEVEFSHEYWMRHALTLAKRAWDEREVPVGAVLVHNNRVIGEGWNRPIGRHDPTAHAEIMAL
RQGGLVMQNYRLIDATLYVTLEPCVMCAGAMIHSRIGRVVFGARDAKTGAAGSLMDVLHHPGM
NHRVEITEGILADECAALLSDFFRMRRQEIKAQKKAQSSTDSGGSSGGSSGSETPGTSESATPESSG
GSSGGSSEVEFSHEYWMRHALTLAKRARDEREVPVGAVLVLNNRVIGEGWNRAIGLHDPTAHAE
IMALRQGGLVMQNYRLIDATLYVTFEPCVMCAGAMIHSRIGRVVFGVRNAKTGAAGSLMDVLH
YPGMNHRVEITEGILADECAALLCYFFRMPRQVFNAQKKAQSSTDSGGSSGGSSGSETPGTSESA
TPESSGGSSGGSDKKYSIGLAIGTNSVGWAVITDEYKVPSKKFKVLGNTDRHSIKKNLIGALLFDS
GETAEATRLKRTARRRYTRRKNRICYLQEIFSNEMAKVDDSFFHRLEESFLVEEDKKHERHPIFGNI
VDEVAYHEKYPTIYHLRKKLVDSTDKADLRLIYLALAHMIKFRGHFLIEGDLNPDNSDVDKLFIQ
LVQTYNQLFEENPINASGVDAKAILSARLSKSRRLENLIAQLPGEKKNGLFGNLIALSLGLTPNFKS
NFDLAEDAKLQLSKDTYDDDLDNLLAQIGDQYADLFLAAKNLSDAILLSDILRVNTEITKAPLSAS
MIKRYDEHHQDLTLLKALVRQQLPEKYKEIFFDQSKNGYAGYIDGGASQEEFYKFIKPILEKMDG
TEELLVKLNREDLLRKQRTFDNGSIPHQIHLGELHAILRRQEDFYPFLKDNREKIEKILTFRIPYYV
GPLARGNSRFAWMTRKSEETITPWNFEEVVDKGASAQSFIERMTNFDKNLPNEKVLPKHSLLYEY
FTVYNELTKVKYVTEGMRKPAFLSGEQKKAIVDLLFKTNRKVTVKQLKEDYFKKIECFDSVEISG
VEDRFNASLGTYHDLLKIIKDKDFLDNEENEDILEDIVLTLTLFEDREMIEERLKTYAHLFDDKVM
KQLKRRRYTGWGRLSRKLINGIRDKQSGKTILDFLKSDGFANRNFMQLIHDDSLTFKEDIQKAQV
SGQGDSLHEHIANLAGSPAIKKGILQTVKVVDELVKVMGRHKPENIVIEMARENQTTQKGQKNS
RERMKRIEEGIKELGSQILKEHPVENTQLQNEKLYLYYLQNGRDMYVDQELDINRLSDYDVDHIV
PQSFLKDDSIDNKVLTRSDKNRGKSDNVPSEEVVKKMKNYWRQLLNAKLITQRKFDNLTKAERG
GLSELDKAGFIKRQLVETRQITKHVAQILDSRMNTKYDENDKLIREVKVITLKSKLVSDFRKDFQF
YKVREINNYHHAHDAYLNAVVGTALIKKYPKLESEFVYGDYKVYDVRKMIAKSEQEIGKATAKY
FFYSNIMNFFKTEITLANGEIRKRPLIETNGETGEIVWDKGRDFATVRKVLSMPQVNIVKKTEVQT
GGFSKESILPKRNSDKLIARKKDWDPKKYGGFDSPTVAYSVLVVAKVEKGKSKKLKSVKELLGIT
IMERSSFEKNPIDFLEAKGYKEVKKDLIIKLPKYSLFELENGRKRMLASAGELQKGNELALPSKY
VNFLYLASHYEKLKGSPEDNEQKQLFVEQHKHYLDEIIEQISEFSKRVILADANLDKVLSAYNKH
RDKPIREQAENIIHLFTLTNLGAPAAFKYFDTTIDRKRYTSTKEVLDATLIHQSITGLYETRIDLS
QLGGDSGGSPKKKRKV
ABE8e
(SEQ ID NO: 169)
MKRTADGSEFESPKKKRKVSEVEFSHEYWMRHALTLAKRARDEREVPVGAVLVLNNRVIGEGW
NRAIGLHDPTAHAEIMALRQGGLVMQNYRLIDATLYVTFEPCVMCAGAMIHSRIGRVVFGVRNS
KRGAAGSLMNVLNYPGMNHRVEITEGILADECAALLCDFYRMPRQVFNAQKKAQSSINSGGSSG
GSSGSETPGTSESATPESSGGSSGGSDKKYSIGLAIGTNSVGWAVITDEYKVPSKKFKVLGNTDRH
SIKKNLIGALLFDSGETAEATRLKRTARRRYTRRKNRICYLQEIFSNEMAKVDDSFFHRLEESFLVE
EDKKHERHPIFGNIVDEVAYHEKYPTIYHLRKKLVDSTDKADLRLIYLALAHMIKFRGHFLIEGDL
NPDNSDVDKLFIQLVQTYNQLFEENPINASGVDAKAILSARLSKSRRLENLIAQLPGEKKNGLFGN
LIALSLGLTPNFKSNFDLAEDAKLQLSKDTYDDDLDNLLAQIGDQYADLFLAAKNLSDAILLSDIL
RVNTEITKAPLSASMIKRYDEHHQDLTLLKALVRQQLPEKYKEIFFDQSKNGYAGYIDGGASQEEF
YKFIKPILEKMDGTEELLVKLNREDLLRKQRTFDNGSIPHQIHLGELHAILRRQEDFYPFLKDNRE
KIEKILTFRIPYYVGPLARGNSRFAWMTRKSEETITPWNFEEVVDKGASAQSFIERMTNFDKNLPN
EKVLPKHSLLYEYFTVYNELTKVKYVTEGMRKPAFLSGEQKKAIVDLLFKTNRKVTVKQLKEDY
FKKIECFDSVEISGVEDRFNASLGTYHDLLKIIKDKDFLDNEENEDILEDIVLTLTLFEDREMIEERL
KTYAHLFDDKVMKQLKRRRYTGWGRLSRKLINGIRDKQSGKTILDFLKSDGFANRNFMQLIHDD
SLTFKEDIQKAQVSGQGDSLHEHIANLAGSPAIKKGILQTVKVVDELVKVMGRHKPENIVIEMAR
ENQTTQKGQKNSRERMKRIEEGIKELGSQILKEHPVENTQLQNEKLYLYYLQNGRDMYVDQELD
INRLSDYDVDHIVPQSFLKDDSIDNKVLTRSDKNRGKSDNVPSEEVVKKMKNYWRQLLNAKLIT
QRKFDNLTKAERGGLSELDKAGFIKRQLVETRQITKHVAQILDSRMNTKYDENDKLIREVKVITL
KSKLVSDFRKDFQFYKVREINNYHHAHDAYLNAVVGTALIKKYPKLESEFVYGDYKVYDVRKMI
AKSEQEIGKATAKYFFYSNIMNFFKTEITLANGEIRKRPLIETNGETGEIVWDKGRDFATVRKVLS
MPQVNIVKKTEVQTGGFSKESILPKRNSDKLIARKKDWDPKKYGGFDSPTVAYSVLVVAKVEKG
KSKKLKSVKELLGITIMERSSFEKNPIDFLEAKGYKEVKKDLIIKLPKYSLFELENGRKRMLASAG
ELQKGNELALPSKYVNFLYLASHYEKLKGSPEDNEQKQLFVEQHKHYLDEIIEQISEFSKRVILAD
ANLDKVLSAYNKHRDKPIREQAENIIHLFTLTNLGAPAAFKYFDTTIDRKRYTSTKEVLDATLIHQ
SITGLYETRIDLSQLGGDSGGSKRTADGSEFEPKKKRKV
ABE8e-dimer
(SEQ ID NO: 170)
MKRTADGSEFESPKKKRKVSEVEFSHEYWMRHALTLAKRAWDEREVPVGAVLVHNNRVIGEGW
NRPIGRHDPTAHAEIMALRQGGLVMQNYRLIDATLYVTLEPCVMCAGAMIHSRIGRVVFGARDA
KTGAAGSLMDVLHHPGMNHRVEITEGILADECAALLSDFFRMRRQEIKAQKKAQSSTDSGGSSG
GSSGSETPGTSESATPESSGGSSGGSSEVEFSHEYWMRHALTLAKRARDEREVPVGAVLVLNNRVI
GEGWNRAIGLHDPTAHAEIMALRQGGLVMQNYRLIDATLYVTFEPCVMCAGAMIHSRIGRVVFG
VRNSKRGAAGSLMNVLNYPGMNHRVEITEGILADECAALLCDFYRMPRQVFNAQKKAQSSINS
GGSSGGSSGSETPGTSESATPESSGGSSGGSDKKYSIGLAIGTNSVGWAVITDEYKVPSKKFKVLG
NTDRHSIKKNLIGALLFDSGETAEATRLKRTARRRYTRRKNRICYLQEIFSNEMAKVDDSFFHRLE
ESFLVEEDKKHERHPIFGNIVDEVAYHEKYPTIYHLRKKLVDSTDKADLRLIYLALAHMIKFRGHF
LIEGDLNPDNSDVDKLFIQLVQTYNQLFEENPINASGVDAKAILSARLSKSRRLENLIAQLPGEKK
NGLFGNLIALSLGLTPNFKSNFDLAEDAKLQLSKDTYDDDLDNLLAQIGDQYADLFLAAKNLSD
AILLSDILRVNTEITKAPLSASMIKRYDEHHQDLTLLKALVRQQLPEKYKEIFFDQSKNGYAGYIDG
GASQEEFYKFIKPILEKMDGTEELLVKLNREDLLRKQRTFDNGSIPHQIHLGELHAILRRQEDFYPF
LKDNREKIEKILTFRIPYYVGPLARGNSRFAWMTRKSEETITPWNFEEVVDKGASAQSFIERMTNF
DKNLPNEKVLPKHSLLYEYFTVYNELTKVKYVTEGMRKPAFLSGEQKKAIVDLLFKTNRKVTVK
QLKEDYFKKIECFDSVEISGVEDRFNASLGTYHDLLKIIKDKDFLDNEENEDILEDIVLTLTLFEDRE
MIEERLKTYAHLFDDKVMKQLKRRRYTGWGRLSRKLINGIRDKQSGKTILDFLKSDGFANRNFM
QLIHDDSLTFKEDIQKAQVSGQGDSLHEHIANLAGSPAIKKGILQTVKVVDELVKVMGRHKPENI
VIEMARENQTTQKGQKNSRERMKRIEEGIKELGSQILKEHPVENTQLQNEKLYLYYLQNGRDMY
VDQELDINRLSDYDVDHIVPQSFLKDDSIDNKVLTRSDKNRGKSDNVPSEEVVKKMKNYWRQLL
NAKLITQRKFDNLTKAERGGLSELDKAGFIKRQLVETRQITKHVAQILDSRMNTKYDENDKLIREV
KVITLKSKLVSDFRKDFQFYKVREINNYHHAHDAYLNAVVGTALIKKYPKLESEFVYGDYKVYD
VRKMIAKSEQEIGKATAKYFFYSNIMNFFKTEITLANGEIRKRPLIETNGETGEIVWDKGRDFATV
RKVLSMPQVNIVKKTEVQTGGFSKESILPKRNSDKLIARKKDWDPKKYGGFDSPTVAYSVLVVA
KVEKGKSKKLKSVKELLGITIMERSSFEKNPIDFLEAKGYKEVKKDLIIKLPKYSLFELENGRKRM
LASAGELQKGNELALPSKYVNFLYLASHYEKLKGSPEDNEQKQLFVEQHKHYLDEIIEQISEFSKR
VILADANLDKVLSAYNKHRDKPIREQAENIIHLFTLTNLGAPAAFKYFDTTIDRKRYTSTKEVLDAT
LIHQSITGLYETRIDLSQLGGDSGGSKRTADGSEFEPKKKRKV
SaABE8e
(SEQ ID NO: 171)
MKRTADGSEFESPKKKRKVSEVEFSHEYWMRHALTLAKRARDEREVPVGAVLVLNNRVIGEGW
NRAIGLHDPTAHAEIMALRQGGLVMQNYRLIDATLYVTFEPCVMCAGAMIHSRIGRVVFGVRNS
KRGAAGSLMNVLNYPGMNHRVEITEGILADECAALLCDFYRMPRQVFNAQKKAQSSINSGGSSG
GSSGSETPGTSESATPESSGGSSGGSGKRNYILGLAIGITSVGYGIIDYETRDVIDAGVRLFKEANV
ENNEGRRSKRGARRLKRRRRHRIQRVKKLLFDYNLLTDHSELSGINPYEARVKGLSQKLSEEEFS
AALLHLAKRRGVHNVNEVEEDTGNELSTKEQISRNSKALEEKYVAELQLERLKKDGEVRGSINR
FKTSDYVKEAKQLLKVQKAYHQLDQSFIDTYIDLLETRRTYYEGPGEGSPFGWKDIKEWYEMLM
GHCTYFPEELRSVKYAYNADLYNALNDLNNLVITRDENEKLEYYEKFQIIENVFKQKKKPTLKQI
AKEILVNEEDIKGYRVTSTGKPEFTNLKVYHDIKDITARKEIIENAELLDQIAKILTIYQSSEDIQEEL
TNLNSELTQEEIEQISNLKGYTGTHNLSLKAINLILDELWHTNDNQIAIFNRLKLVPKKVDLSQQKE
IPTTLVDDFILSPVVKRSFIQSIKVINAIIKKYGLPNDIIIELAREKNSKDAQKMINEMQKRNRQTNE
RIEEIIRTTGKENAKYLIEKIKLHDMQEGKCLYSLEAIPLEDLLNNPFNYEVDHIIPRSVSFDNSFNN
KVLVKQEENSKKGNRTPFQYLSSSDSKISYETFKKHILNLAKGKGRISKTKKEYLLEERDINRFSV
QKDFINRNLVDTRYATRGLMNLLRSYFRVNNLDVKVKSINGGFTSFLRRKWKFKKERNKGYKHH
AEDALIIANADFIFKEWKKLDKAKKVMENQMFEEKQAESMPEIETEQEYKEIFITPHQIKHIKDFK
DYKYSHRVDKKPNRELINDTLYSTRKDDKGNTLIVNNLNGLYDKDNDKLKKLINKSPEKLLMYH
HDPQTYQKLKLIMEQYGDEKNPLYKYYEETGNYLTKYSKKDNGPVIKKIKYYGNKLNAHLDITD
DYPNSRNKVVKLSLKPYRFDVYLDNGVYKFVTVKNLDVIKKENYYEVNSKCYEEAKKLKKISN
QAEFIASFYNNDLIKINGELYRVIGVNNDLLNRIEVNMIDITYREYLENMNDKRPPRIIKTIASKTQS
IKKYSTDILGNLYEVKSKKHPQIIKKGSGGSKRTADGSEFEPKKKRKV
SaABE8e-dimer
(SEQ ID NO: 172)
MKRTADGSEFESPKKKRKVSEVEFSHEYWMRHALTLAKRAWDEREVPVGAVLVHNNRVIGEGW
NRPIGRHDPTAHAEIMALRQGGLVMQNYRLIDATLYVTLEPCVMCAGAMIHSRIGRVVFGARDA
KTGAAGSLMDVLHHPGMNHRVEITEGILADECAALLSDFFRMRRQEIKAQKKAQSSTDSGGSSG
GSSGSETPGTSESATPESSGGSSGGSSEVEFSHEYWMRHALTLAKRARDEREVPVGAVLVLNNRVI
GEGWNRAIGLHDPTAHAEIMALRQGGLVMQNYRLIDATLYVTFEPCVMCAGAMIHSRIGRVVFG
VRNSKRGAAGSLMNVLNYPGMNHRVEITEGILADECAALLCDFYRMPRQVFNAQKKAQSSINS
GGSSGGSSGSETPGTSESATPESSGGSSGGSGKRNYILGLAIGITSVGYGIIDYETRDVIDAGVRLFK
EANVENNEGRRSKRGARRLKRRRRHRIQRVKKLLFDYNLLTDHSELSGINPYEARVKGLSQKLSE
EEFSAALLHLAKRRGVHNVNEVEEDTGNELSTKEQISRNSKALEEKYVAELQLERLKKDGEVRG
SINRFKTSDYVKEAKQLLKVQKAYHQLDQSFIDTYIDLLETRRTYYEGPGEGSPFGWKDIKEWYE
MLMGHCTYFPEELRSVKYAYNADLYNALNDLNNLVITRDENEKLEYYEKFQIIENVFKQKKKPT
LKQIAKEILVNEEDIKGYRVTSTGKPEFTNLKVYHDIKDITARKEIIENAELLDQIAKILTIYQSSEDI
QEELTNLNSELTQEEIEQISNLKGYTGTHNLSLKAINLILDELWHTNDNQIAIFNRLKLVPKKVDLS
QQKEIPTTLVDDFILSPVVKRSFIQSIKVINAIIKKYGLPNDIIIELAREKNSKDAQKMINEMQKRNR
QTNERIEEIIRTTGKENAKYLIEKIKLHDMQEGKCLYSLEAIPLEDLLNNPFNYEVDHIIPRSVSFDN
SFNNKVLVKQEENSKKGNRTPFQYLSSSDSKISYETFKKHILNLAKGKGRISKTKKEYLLEERDIN
RFSVQKDFINRNLVDTRYATRGLMNLLRSYFRVNNLDVKVKSINGGFTSFLRRKWKFKKERNKG
YKHHAEDALIIANADFIFKEWKKLDKAKKVMENQMFEEKQAESMPEIETEQEYKEIFITPHQIKHI
KDFKDYKYSHRVDKKPNRELINDTLYSTRKDDKGNTLIVNNLNGLYDKDNDKLKKLINKSPEKL
LMYHHDPQTYQKLKLIMEQYGDEKNPLYKYYEETGNYLTKYSKKDNGPVIKKIKYYGNKLNAH
LDITDDYPNSRNKVVKLSLKPYRFDVYLDNGVYKFVTVKNLDVIKKENYYEVNSKCYEEAKKL
KKISNQAEFIASFYNNDLIKINGELYRVIGVNNDLLNRIEVNMIDITYREYLENMNDKRPPRIIKTIA
SKTQSIKKYSTDILGNLYEVKSKKHPQIIKKGSGGSKRTADGSEFEPKKKRKV
LbABE8e
(SEQ ID NO: 173)
MKRTADGSEFESPKKKRKVSEVEFSHEYWMRHALTLAKRARDEREVPVGAVLVLNNRVIGEGW
NRAIGLHDPTAHAEIMALRQGGLVMQNYRLIDATLYVTFEPCVMCAGAMIHSRIGRVVFGVRNS
KRGAAGSLMNVLNYPGMNHRVEITEGILADECAALLCDFYRMPRQVFNAQKKAQSSINSGGSSG
GSSGSETPGTSESATPESSGGSSGGSSKLEKFTNCYSLSKTLRFKAIPVGKTQENIDNKRLLVEDEK
RAEDYKGVKKLLDRYYLSFINDVLHSIKLKNLNNYISLFRKKTRTEKENKELENLEINLRKEIAKA
FKGNEGYKSLFKKDIIETILPEFLDDKDEIALVNSFNGFTTAFTGFFDNRENMFSEEAKSTSIAFRCI
NENLTRYISNMDIFEKVDAIFDKHEVQEIKEKILNSDYDVEDFFEGEFFNFVLTQEGIDVYNAIIGG
FVTESGEKIKGLNEYINLYNQKTKQKLPKFKPLYKQVLSDRESLSFYGEGYTSDEEVLEVFRNTLN
KNSEIFSSIKKLEKLFKNFDEYSSAGIFVKNGPAISTISKDIFGEWNVIRDKWNAEYDDIHLKKKAV
VTEKYEDDRRKSFKKIGSFSLEQLQEYADADLSVVEKLKEIIIQKVDEIYKVYGSSEKLFDADFVL
EKSLKKNDAVVAIMKDLLDSVKSFENYIKAFFGEGKETNRDESFYGDFVLAYDILLKVDHIYDAI
RNYVTQKPYSKDKFKLYFQNPQFMGGWDKDKETDYRATILRYGSKYYLAIMDKKYAKCLQKID
KDDVNGNYEKINYKLLPGPNKMLPKVFFSKKWMAYYNPSEDIQKIYKNGTFKKGDMFNLNDCH
KLIDFFKDSISRYPKWSNAYDFNFSETEKYKDIAGFYREVEEQGYKVSFESASKKEVDKLVEEGK
LYMFQIYNKDFSDKSHGTPNLHTMYFKLLFDENNHGQIRLSGGAELFMRRASLKKEELVVHPAN
SPIANKNPDNPKKTTTLSYDVYKDKRFSEDQYELHIPIAINKCPKNIFKINTEVRVLLKHDDNPYVI
GIARGERNLLYIVVVDGKGNIVEQYSLNEIINNFNGIRIKTDYHSLLDKKEKERFEARQNWTSIENI
KELKAGYISQVVHKICELVEKYDAVIALEDLNSGFKNSRVKVEKQVYQKFEKMLIDKLNYMVDK
KSNPCATGGALKGYQITNKFESFKSMSTQNGFIFYIPAWLTSKIDPSTGFVNLLKTKYTSIADSKKF
ISSFDRIMYVPEEDLFEFALDYKNFSRTDADYIKKWKLYSYGNRIRIFRNPKKNNVFDWEEVCLTS
AYKELFNKYGINYQQGDIRALLCEQSDKAFYSSFMALMSLMLQMRNSITGRTDVDFLISPVKNSD
GIFYDSRNYEAQENAILPKNADANGAYNIARKVLWAIGQFKKAEDEKLDKVKIAISNKEWLEYA
QTSVKSGGSKRTADGSEFEPKKKRKV
LbABE8e-dimer
(SEQ ID NO: 174)
MKRTADGSEFESPKKKRKVSEVEFSHEYWMRHALTLAKRAWDEREVPVGAVLVHNNRVIGEGW
NRPIGRHDPTAHAEIMALRQGGLVMQNYRLIDATLYVTLEPCVMCAGAMIHSRIGRVVFGARDA
KTGAAGSLMDVLHHPGMNHRVEITEGILADECAALLSDFFRMRRQEIKAQKKAQSSTDSGGSSG
GSSGSETPGTSESATPESSGGSSGGSSEVEFSHEYWMRHALTLAKRARDEREVPVGAVLVLNNRVI
GEGWNRAIGLHDPTAHAEIMALRQGGLVMQNYRLIDATLYVTFEPCVMCAGAMIHSRIGRVVFG
VRNSKRGAAGSLMNVLNYPGMNHRVEITEGILADECAALLCDFYRMPRQVFNAQKKAQSSINS
GGSSGGSSGSETPGTSESATPESSGGSSGGSSKLEKFTNCYSLSKTLRFKAIPVGKTQENIDNKRLL
VEDEKRAEDYKGVKKLLDRYYLSFINDVLHSIKLKNLNNYISLFRKKTRTEKENKELENLEINLR
KEIAKAFKGNEGYKSLFKKDIIETILPEFLDDKDEIALVNSFNGFTTAFTGFFDNRENMFSEEAKST
SIAFRCINENLTRYISNMDIFEKVDAIFDKHEVQEIKEKILNSDYDVEDFFEGEFFNFVLTQEGIDVY
NAIIGGFVTESGEKIKGLNEYINLYNQKTKQKLPKFKPLYKQVLSDRESLSFYGEGYTSDEEVLEV
FRNTLNKNSEIFSSIKKLEKLFKNFDEYSSAGIFVKNGPAISTISKDIFGEWNVIRDKWNAEYDDIH
LKKKAVVTEKYEDDRRKSFKKIGSFSLEQLQEYADADLSVVEKLKEIIIQKVDEIYKVYGSSEKLF
DADFVLEKSLKKNDAVVAIMKDLLDSVKSFENYIKAFFGEGKETNRDESFYGDFVLAYDILLKVD
HIYDAIRNYVTQKPYSKDKFKLYFQNPQFMGGWDKDKETDYRATILRYGSKYYLAIMDKKYAK
CLQKIDKDDVNGNYEKINYKLLPGPNKMLPKVFFSKKWMAYYNPSEDIQKIYKNGTFKKGDMF
NLNDCHKLIDFFKDSISRYPKWSNAYDFNFSETEKYKDIAGFYREVEEQGYKVSFESASKKEVDK
LVEEGKLYMFQIYNKDFSDKSHGTPNLHTMYFKLLFDENNHGQIRLSGGAELFMRRASLKKEEL
VVHPANSPIANKNPDNPKKTTTLSYDVYKDKRFSEDQYELHIPIAINKCPKNIFKINTEVRVLLKH
DDNPYVIGIARGERNLLYIVVVDGKGNIVEQYSLNEIINNFNGIRIKTDYHSLLDKKEKERFEARQ
NWTSIENIKELKAGYISQVVHKICELVEKYDAVIALEDLNSGFKNSRVKVEKQVYQKFEKMLIDK
LNYMVDKKSNPCATGGALKGYQITNKFESFKSMSTQNGFIFYIPAWLTSKIDPSTGFVNLLKTKYT
SIADSKKFISSFDRIMYVPEEDLFEFALDYKNFSRTDADYIKKWKLYSYGNRIRIFRNPKKNNVFD
WEEVCLTSAYKELFNKYGINYQQGDIRALLCEQSDKAFYSSFMALMSLMLQMRNSITGRTDVDF
LISPVKNSDGIFYDSRNYEAQENAILPKNADANGAYNIARKVLWAIGQFKKAEDEKLDKVKIAIS
NKEWLEYAQTSVKSGGSKRTADGSEFEPKKKRKV
LbABE7.10
(SEQ ID NO: 175)
MKRTADGSEFESPKKKRKVSEVEFSHEYWMRHALTLAKRAWDEREVPVGAVLVHNNRVIGEGW
NRPIGRHDPTAHAEIMALRQGGLVMQNYRLIDATLYVTLEPCVMCAGAMIHSRIGRVVFGARDA
KTGAAGSLMDVLHHPGMNHRVEITEGILADECAALLSDFFRMRRQEIKAQKKAQSSTDSGGSSG
GSSGSETPGTSESATPESSGGSSGGSSEVEFSHEYWMRHALTLAKRARDEREVPVGAVLVLNNRVI
GEGWNRAIGLHDPTAHAEIMALRQGGLVMQNYRLIDATLYVTFEPCVMCAGAMIHSRIGRVVFG
VRNAKTGAAGSLMDVLHYPGMNHRVEITEGILADECAALLCYFFRMPRQVFNAQKKAQSSTDS
GGSSGGSSGSETPGTSESATPESSGGSSGGSSKLEKFTNCYSLSKTLRFKAIPVGKTQENIDNKRLL
VEDEKRAEDYKGVKKLLDRYYLSFINDVLHSIKLKNLNNYISLFRKKTRTEKENKELENLEINLR
KEIAKAFKGNEGYKSLFKKDIIETILPEFLDDKDEIALVNSFNGFTTAFTGFFDNRENMFSEEAKST
SIAFRCINENLTRYISNMDIFEKVDAIFDKHEVQEIKEKILNSDYDVEDFFEGEFFNFVLTQEGIDVY
NAIIGGFVTESGEKIKGLNEYINLYNQKTKQKLPKFKPLYKQVLSDRESLSFYGEGYTSDEEVLEV
FRNTLNKNSEIFSSIKKLEKLFKNFDEYSSAGIFVKNGPAISTISKDIFGEWNVIRDKWNAEYDDIH
LKKKAVVTEKYEDDRRKSFKKIGSFSLEQLQEYADADLSVVEKLKEIIIQKVDEIYKVYGSSEKLF
DADFVLEKSLKKNDAVVAIMKDLLDSVKSFENYIKAFFGEGKETNRDESFYGDFVLAYDILLKVD
HIYDAIRNYVTQKPYSKDKFKLYFQNPQFMGGWDKDKETDYRATILRYGSKYYLAIMDKKYAK
CLQKIDKDDVNGNYEKINYKLLPGPNKMLPKVFFSKKWMAYYNPSEDIQKIYKNGTFKKGDMF
NLNDCHKLIDFFKDSISRYPKWSNAYDFNFSETEKYKDIAGFYREVEEQGYKVSFESASKKEVDK
LVEEGKLYMFQIYNKDFSDKSHGTPNLHTMYFKLLFDENNHGQIRLSGGAELFMRRASLKKEEL
VVHPANSPIANKNPDNPKKTTTLSYDVYKDKRFSEDQYELHIPIAINKCPKNIFKINTEVRVLLKH
DDNPYVIGIARGERNLLYIVVVDGKGNIVEQYSLNEIINNFNGIRIKTDYHSLLDKKEKERFEARQ
NWTSIENIKELKAGYISQVVHKICELVEKYDAVIALEDLNSGFKNSRVKVEKQVYQKFEKMLIDK
LNYMVDKKSNPCATGGALKGYQITNKFESFKSMSTQNGFIFYIPAWLTSKIDPSTGFVNLLKTKYT
SIADSKKFISSFDRIMYVPEEDLFEFALDYKNFSRTDADYIKKWKLYSYGNRIRIFRNPKKNNVFD
WEEVCLTSAYKELFNKYGINYQQGDIRALLCEQSDKAFYSSFMALMSLMLQMRNSITGRTDVDF
LISPVKNSDGIFYDSRNYEAQENAILPKNADANGAYNIARKVLWAIGQFKKAEDEKLDKVKIAIS
NKEWLEYAQTSVKSGGSKRTADGSEFEPKKKRKV
enAsABE8e
(SEQ ID NO: 176)
MKRTADGSEFESPKKKRKVSEVEFSHEYWMRHALTLAKRARDEREVPVGAVLVLNNRVIGEGW
NRAIGLHDPTAHAEIMALRQGGLVMQNYRLIDATLYVTFEPCVMCAGAMIHSRIGRVVFGVRNS
KRGAAGSLMNVLNYPGMNHRVEITEGILADECAALLCDFYRMPRQVFNAQKKAQSSINSGGSSG
GSSGSETPGTSESATPESSGGSSGGSMTQFEGFTNLYQVSKTLRFELIPQGKTLKHIQEQGFIEEDK
ARNDHYKELKPIIDRIYKTYADQCLQLVQLDWENLSAAIDSYRKEKTEETRNALIEEQATYRNAIH
DYFIGRTDNLTDAINKRHAEIYKGLFKAELFNGKVLKQLGTVTTTEHENALLRSFDKFTTYFSGF
YRNRKNVFSAEDISTAIPHRIVQDNFPKFKENCHIFTRLITAVPSLREHFENVKKAIGIFVSTSIEEVF
SFPFYNQLLTQTQIDLYNQLLGGISREAGTEKIKGLNEVLNLAIQKNDETAHIIASLPHRFIPLFKQI
LSDRNTLSFILEEFKSDEEVIQSFCKYKTLLRNENVLETAEALFNELNSIDLTHIFISHKKLETISSAL
CDHWDTLRNALYERRISELTGKITKSAKEKVQRSLKHEDINLQEIISAAGKELSEAFKQKTSEILSH
AHAALDQPLPTTLKKQEEKEILKSQLDSLLGLYHLLDWFAVDESNEVDPEFSARLTGIKLEMEPSL
SFYNKARNYATKKPYSVEKFKLNFQMPTLARGWDVNREKNNGAILFVKNGLYYLGIMPKQKGR
YKALSFEPTEKTSEGFDKMYYDYFPDAAKMIPKCSTQLKAVTAHFQTHTTPILLSNNFIEPLEITKE
IYDLNNPEKEPKKFQTAYAKKTGDQKGYREALCKWIDFTRDFLSKYTKTTSIDLSSLRPSSQYKD
LGEYYAELNPLLYHISFQRIAEKEIMDAVETGKLYLFQIYNKDFAKGHHGKPNLHTLYWTGLFSPE
NLAKTSIKLNGQAELFYRPKSRMKRMAHRLGEKMLNKKLKDQKTPIPDTLYQELYDYVNHRLS
HDLSDEARALLPNVITKEVSHEIIKDRRFTSDKFFFHVPITLNYQAANSPSKFNQRVNAYLKEHPE
TPIIGIARGERNLIYITVIDSTGKILEQRSLNTIQQFDYQKKLDNREKERVAARQAWSVVGTIKDLK
QGYLSQVIHEIVDLMIHYQAVVVLENLNFGFKSKRTGIAEKAVYQQFEKMLIDKLNCLVLKDYPA
EKVGGVLNPYQLTDQFTSFAKMGTQSGFLFYVPAPYTSKIDPLTGFVDPFVWKTIKNHESRKHFL
EGFDFLHYDVKTGDFILHFKMNRNLSFQRGLPGFMPAWDIVFEKNETQFDAKGTPFIAGKRIVPVI
ENHRFTGRYRDLYPANELIALLEEKGIVFRDGSNILPKLLENDDSHAIDTMVALIRSVLQMRNSNA
ATGEDYINSPVRDLNGVCFDSRFQNPEWPMDADANGAYHIALKGQLLLNHLKESKDLKLQNGIS
NQDWLAYIQELRNSGGSKRTADGSEFEPKKKRKV
enAsABE8e-dimer
(SEQ ID NO: 177)
MKRTADGSEFESPKKKRKVSEVEFSHEYWMRHALTLAKRAWDEREVPVGAVLVHNNRVIGEGW
NRPIGRHDPTAHAEIMALRQGGLVMQNYRLIDATLYVTLEPCVMCAGAMIHSRIGRVVFGARDA
KTGAAGSLMDVLHHPGMNHRVEITEGILADECAALLSDFFRMRRQEIKAQKKAQSSTDSGGSSG
GSSGSETPGTSESATPESSGGSSGGSSEVEFSHEYWMRHALTLAKRARDEREVPVGAVLVLNNRVI
GEGWNRAIGLHDPTAHAEIMALRQGGLVMQNYRLIDATLYVTFEPCVMCAGAMIHSRIGRVVFG
VRNSKRGAAGSLMNVLNYPGMNHRVEITEGILADECAALLCDFYRMPRQVFNAQKKAQSSINS
GGSSGGSSGSETPGTSESATPESSGGSSGGSMTQFEGFTNLYQVSKTLRFELIPQGKTLKHIQEQGF
IEEDKARNDHYKELKPIIDRIYKTYADQCLQLVQLDWENLSAAIDSYRKEKTEETRNALIEEQATY
RNAIHDYFIGRTDNLTDAINKRHAEIYKGLFKAELFNGKVLKQLGTVTTTEHENALLRSFDKFTT
YFSGFYRNRKNVFSAEDISTAIPHRIVQDNFPKFKENCHIFTRLITAVPSLREHFENVKKAIGIFVST
SIEEVFSFPFYNQLLTQTQIDLYNQLLGGISREAGTEKIKGLNEVLNLAIQKNDETAHIIASLPHRFIP
LFKQILSDRNTLSFILEEFKSDEEVIQSFCKYKTLLRNENVLETAEALFNELNSIDLTHIFISHKKLET
ISSALCDHWDTLRNALYERRISELTGKITKSAKEKVQRSLKHEDINLQEIISAAGKELSEAFKQKTS
EILSHAHAALDQPLPTTLKKQEEKEILKSQLDSLLGLYHLLDWFAVDESNEVDPEFSARLTGIKLE
MEPSLSFYNKARNYATKKPYSVEKFKLNFQMPTLARGWDVNREKNNGAILFVKNGLYYLGIMP
KQKGRYKALSFEPTEKTSEGFDKMYYDYFPDAAKMIPKCSTQLKAVTAHFQTHTTPILLSNNFIEP
LEITKEIYDLNNPEKEPKKFQTAYAKKTGDQKGYREALCKWIDFTRDFLSKYTKTTSIDLSSLRPS
SQYKDLGEYYAELNPLLYHISFQRIAEKEIMDAVETGKLYLFQIYNKDFAKGHHGKPNLHTLYWT
GLFSPENLAKTSIKLNGQAELFYRPKSRMKRMAHRLGEKMLNKKLKDQKTPIPDTLYQELYDYV
NHRLSHDLSDEARALLPNVITKEVSHEIIKDRRFTSDKFFFHVPITLNYQAANSPSKFNQRVNAYL
KEHPETPIIGIARGERNLIYITVIDSTGKILEQRSLNTIQQFDYQKKLDNREKERVAARQAWSVVGTI
KDLKQGYLSQVIHEIVDLMIHYQAVVVLENLNFGFKSKRTGIAEKAVYQQFEKMLIDKLNCLVLK
DYPAEKVGGVLNPYQLTDQFTSFAKMGTQSGFLFYVPAPYTSKIDPLTGFVDPFVWKTIKNHESR
KHFLEGFDFLHYDVKTGDFILHFKMNRNLSFQRGLPGFMPAWDIVFEKNETQFDAKGTPFIAGKR
IVPVIENHRFTGRYRDLYPANELIALLEEKGIVFRDGSNILPKLLENDDSHAIDTMVALIRSVLQMR
NSNAATGEDYINSPVRDLNGVCFDSRFQNPEWPMDADANGAYHIALKGQLLLNHLKESKDLKL
QNGISNQDWLAYIQELRNSGGSKRTADGSEFEPKKKRKV
enAsABE7.10
(SEQ ID NO: 178)
MKRTADGSEFESPKKKRKVSEVEFSHEYWMRHALTLAKRAWDEREVPVGAVLVHNNRVIGEGW
NRPIGRHDPTAHAEIMALRQGGLVMQNYRLIDATLYVTLEPCVMCAGAMIHSRIGRVVFGARDA
KTGAAGSLMDVLHHPGMNHRVEITEGILADECAALLSDFFRMRRQEIKAQKKAQSSTDSGGSSG
GSSGSETPGTSESATPESSGGSSGGSSEVEFSHEYWMRHALTLAKRARDEREVPVGAVLVLNNRVI
GEGWNRAIGLHDPTAHAEIMALRQGGLVMQNYRLIDATLYVTFEPCVMCAGAMIHSRIGRVVFG
VRNAKTGAAGSLMDVLHYPGMNHRVEITEGILADECAALLCYFFRMPRQVFNAQKKAQSSTDS
GGSSGGSSGSETPGTSESATPESSGGSSGGSMTQFEGFTNLYQVSKTLRFELIPQGKTLKHIQEQGF
IEEDKARNDHYKELKPIIDRIYKTYADQCLQLVQLDWENLSAAIDSYRKEKTEETRNALIEEQATY
RNAIHDYFIGRTDNLTDAINKRHAEIYKGLFKAELFNGKVLKQLGTVTTTEHENALLRSFDKFTT
YFSGFYRNRKNVFSAEDISTAIPHRIVQDNFPKFKENCHIFTRLITAVPSLREHFENVKKAIGIFVST
SIEEVFSFPFYNQLLTQTQIDLYNQLLGGISREAGTEKIKGLNEVLNLAIQKNDETAHIIASLPHRFIP
LFKQILSDRNTLSFILEEFKSDEEVIQSFCKYKTLLRNENVLETAEALFNELNSIDLTHIFISHKKLET
ISSALCDHWDTLRNALYERRISELTGKITKSAKEKVQRSLKHEDINLQEIISAAGKELSEAFKQKTS
EILSHAHAALDQPLPTTLKKQEEKEILKSQLDSLLGLYHLLDWFAVDESNEVDPEFSARLTGIKLE
MEPSLSFYNKARNYATKKPYSVEKFKLNFQMPTLARGWDVNREKNNGAILFVKNGLYYLGIMP
KQKGRYKALSFEPTEKTSEGFDKMYYDYFPDAAKMIPKCSTQLKAVTAHFQTHTTPILLSNNFIEP
LEITKEIYDLNNPEKEPKKFQTAYAKKTGDQKGYREALCKWIDFTRDFLSKYTKTTSIDLSSLRPS
SQYKDLGEYYAELNPLLYHISFQRIAEKEIMDAVETGKLYLFQIYNKDFAKGHHGKPNLHTLYWT
GLFSPENLAKTSIKLNGQAELFYRPKSRMKRMAHRLGEKMLNKKLKDQKTPIPDTLYQELYDYV
NHRLSHDLSDEARALLPNVITKEVSHEIIKDRRFTSDKFFFHVPITLNYQAANSPSKFNQRVNAYL
KEHPETPIIGIARGERNLIYITVIDSTGKILEQRSLNTIQQFDYQKKLDNREKERVAARQAWSVVGTI
KDLKQGYLSQVIHEIVDLMIHYQAVVVLENLNFGFKSKRTGIAEKAVYQQFEKMLIDKLNCLVLK
DYPAEKVGGVLNPYQLTDQFTSFAKMGTQSGFLFYVPAPYTSKIDPLTGFVDPFVWKTIKNHESR
KHFLEGFDFLHYDVKTGDFILHFKMNRNLSFQRGLPGFMPAWDIVFEKNETQFDAKGTPFIAGKR
IVPVIENHRFTGRYRDLYPANELIALLEEKGIVFRDGSNILPKLLENDDSHAIDTMVALIRSVLQMR
NSNAATGEDYINSPVRDLNGVCFDSRFQNPEWPMDADANGAYHIALKGQLLLNHLKESKDLKL
QNGISNQDWLAYIQELRNSGGSKRTADGSEFEPKKKRKV
SpCas9NG-ABE8e (“NG-ABE8e”)
(SEQ ID NO: 179)
MKRTADGSEFESPKKKRKVSEVEFSHEYWMRHALTLAKRARDEREVPVGAVLVLNNRVIGEGW
NRAIGLHDPTAHAEIMALRQGGLVMQNYRLIDATLYVTFEPCVMCAGAMIHSRIGRVVFGVRNS
KRGAAGSLMNVLNYPGMNHRVEITEGILADECAALLCDFYRMPRQVFNAQKKAQSSINSGGSSG
GSSGSETPGTSESATPESSGGSSGGSDKKYSIGLAIGTNSVGWAVITDEYKVPSKKFKVLGNTDRH
SIKKNLIGALLFDSGETAEATRLKRTARRRYTRRKNRICYLQEIFSNEMAKVDDSFFHRLEESFLVE
EDKKHERHPIFGNIVDEVAYHEKYPTIYHLRKKLVDSTDKADLRLIYLALAHMIKFRGHFLIEGDL
NPDNSDVDKLFIQLVQTYNQLFEENPINASGVDAKAILSARLSKSRRLENLIAQLPGEKKNGLFGN
LIALSLGLTPNFKSNFDLAEDAKLQLSKDTYDDDLDNLLAQIGDQYADLFLAAKNLSDAILLSDIL
RVNTEITKAPLSASMIKRYDEHHQDLTLLKALVRQQLPEKYKEIFFDQSKNGYAGYIDGGASQEEF
YKFIKPILEKMDGTEELLVKLNREDLLRKQRTFDNGSIPHQIHLGELHAILRRQEDFYPFLKDNRE
KIEKILTFRIPYYVGPLARGNSRFAWMTRKSEETITPWNFEEVVDKGASAQSFIERMTNFDKNLPN
EKVLPKHSLLYEYFTVYNELTKVKYVTEGMRKPAFLSGEQKKAIVDLLFKTNRKVTVKQLKEDY
FKKIECFDSVEISGVEDRFNASLGTYHDLLKIIKDKDFLDNEENEDILEDIVLTLTLFEDREMIEERL
KTYAHLFDDKVMKQLKRRRYTGWGRLSRKLINGIRDKQSGKTILDFLKSDGFANRNFMQLIHDD
SLTFKEDIQKAQVSGQGDSLHEHIANLAGSPAIKKGILQTVKVVDELVKVMGRHKPENIVIEMAR
ENQTTQKGQKNSRERMKRIEEGIKELGSQILKEHPVENTQLQNEKLYLYYLQNGRDMYVDQELD
INRLSDYDVDHIVPQSFLKDDSIDNKVLTRSDKNRGKSDNVPSEEVVKKMKNYWRQLLNAKLIT
QRKFDNLTKAERGGLSELDKAGFIKRQLVETRQITKHVAQILDSRMNTKYDENDKLIREVKVITL
KSKLVSDFRKDFQFYKVREINNYHHAHDAYLNAVVGTALIKKYPKLESEFVYGDYKVYDVRKMI
AKSEQEIGKATAKYFFYSNIMNFFKTEITLANGEIRKRPLIETNGETGEIVWDKGRDFATVRKVLS
MPQVNIVKKTEVQTGGFSKESIRPKRNSDKLIARKKDWDPKKYGGFVSPTVAYSVLVVAKVEKG
KSKKLKSVKELLGITIMERSSFEKNPIDFLEAKGYKEVKKDLIIKLPKYSLFELENGRKRMLASAR
FLQKGNELALPSKYVNFLYLASHYEKLKGSPEDNEQKQLFVEQHKHYLDEIIEQISEFSKRVILAD
ANLDKVLSAYNKHRDKPIREQAENIIHLFTLTNLGAPRAFKYFDTTIDRKVYRSTKEVLDATLIHQ
SITGLYETRIDLSQLGGDSGGSKRTADGSEFEPKKKRKV
NG-ABE8e-dimer
(SEQ ID NO: 180)
MKRTADGSEFESPKKKRKVSEVEFSHEYWMRHALTLAKRAWDEREVPVGAVLVHNNRVIGEGW
NRPIGRHDPTAHAEIMALRQGGLVMQNYRLIDATLYVTLEPCVMCAGAMIHSRIGRVVFGARDA
KTGAAGSLMDVLHHPGMNHRVEITEGILADECAALLSDFFRMRRQEIKAQKKAQSSTDSGGSSG
GSSGSETPGTSESATPESSGGSSGGSSEVEFSHEYWMRHALTLAKRARDEREVPVGAVLVLNNRVI
GEGWNRAIGLHDPTAHAEIMALRQGGLVMQNYRLIDATLYVTFEPCVMCAGAMIHSRIGRVVFG
VRNSKRGAAGSLMNVLNYPGMNHRVEITEGILADECAALLCDFYRMPRQVFNAQKKAQSSINS
GGSSGGSSGSETPGTSESATPESSGGSSGGSDKKYSIGLAIGTNSVGWAVITDEYKVPSKKFKVLG
NTDRHSIKKNLIGALLFDSGETAEATRLKRTARRRYTRRKNRICYLQEIFSNEMAKVDDSFFHRLE
ESFLVEEDKKHERHPIFGNIVDEVAYHEKYPTIYHLRKKLVDSTDKADLRLIYLALAHMIKFRGHF
LIEGDLNPDNSDVDKLFIQLVQTYNQLFEENPINASGVDAKAILSARLSKSRRLENLIAQLPGEKK
NGLFGNLIALSLGLTPNFKSNFDLAEDAKLQLSKDTYDDDLDNLLAQIGDQYADLFLAAKNLSD
AILLSDILRVNTEITKAPLSASMIKRYDEHHQDLTLLKALVRQQLPEKYKEIFFDQSKNGYAGYIDG
GASQEEFYKFIKPILEKMDGTEELLVKLNREDLLRKQRTFDNGSIPHQIHLGELHAILRRQEDFYPF
LKDNREKIEKILTFRIPYYVGPLARGNSRFAWMTRKSEETITPWNFEEVVDKGASAQSFIERMTNF
DKNLPNEKVLPKHSLLYEYFTVYNELTKVKYVTEGMRKPAFLSGEQKKAIVDLLFKTNRKVTVK
QLKEDYFKKIECFDSVEISGVEDRFNASLGTYHDLLKIIKDKDFLDNEENEDILEDIVLTLTLFEDR
EMIEERLKTYAHLFDDKVMKQLKRRRYTGWGRLSRKLINGIRDKQSGKTILDFLKSDGFANRNF
MQLIHDDSLTFKEDIQKAQVSGQGDSLHEHIANLAGSPAIKKGILQTVKVVDELVKVMGRHKPEN
IVIEMARENQTTQKGQKNSRERMKRIEEGIKELGSQILKEHPVENTQLQNEKLYLYYLQNGRDMY
VDQELDINRLSDYDVDHIVPQSFLKDDSIDNKVLTRSDKNRGKSDNVPSEEVVKKMKNYWRQLL
NAKLITQRKFDNLTKAERGGLSELDKAGFIKRQLVETRQITKHVAQILDSRMNTKYDENDKLIRE
VKVITLKSKLVSDFRKDFQFYKVREINNYHHAHDAYLNAVVGTALIKKYPKLESEFVYGDYKVY
DVRKMIAKSEQEIGKATAKYFFYSNIMNFFKTEITLANGEIRKRPLIETNGETGEIVWDKGRDFAT
VRKVLSMPQVNIVKKTEVQTGGFSKESIRPKRNSDKLIARKKDWDPKKYGGFVSPTVAYSVLVV
AKVEKGKSKKLKSVKELLGITIMERSSFEKNPIDFLEAKGYKEVKKDLIIKLPKYSLFELENGRKR
MLASARFLQKGNELALPSKYVNFLYLASHYEKLKGSPEDNEQKQLFVEQHKHYLDEIIEQISEFS
KRVILADANLDKVLSAYNKHRDKPIREQAENIIHLFTLTNLGAPRAFKYFDTTIDRKVYRSTKEVL
DATLIHQSITGLYETRIDLSQLGGDSGGSKRTADGSEFEPKKKRKV
SaKKH-ABE8e (“KKH-ABE8e”)
(SEQ ID NO: 181)
MKRTADGSEFESPKKKRKVSEVEFSHEYWMRHALTLAKRARDEREVPVGAVLVLNNRVIGEGW
NRAIGLHDPTAHAEIMALRQGGLVMQNYRLIDATLYVTFEPCVMCAGAMIHSRIGRVVFGVRNS
KRGAAGSLMNVLNYPGMNHRVEITEGILADECAALLCDFYRMPRQVFNAQKKAQSSINSGGSSG
GSSGSETPGTSESATPESSGGSSGGSGKRNYILGLAIGITSVGYGIIDYETRDVIDAGVRLFKEANV
ENNEGRRSKRGARRLKRRRRHRIQRVKKLLFDYNLLTDHSELSGINPYEARVKGLSQKLSEEEFS
AALLHLAKRRGVHNVNEVEEDTGNELSTKEQISRNSKALEEKYVAELQLERLKKDGEVRGSINR
FKTSDYVKEAKQLLKVQKAYHQLDQSFIDTYIDLLETRRTYYEGPGEGSPFGWKDIKEWYEMLM
GHCTYFPEELRSVKYAYNADLYNALNDLNNLVITRDENEKLEYYEKFQIIENVFKQKKKPTLKQI
AKEILVNEEDIKGYRVTSTGKPEFTNLKVYHDIKDITARKEIIENAELLDQIAKILTIYQSSEDIQEEL
TNLNSELTQEEIEQISNLKGYTGTHNLSLKAINLILDELWHTNDNQIAIFNRLKLVPKKVDLSQQKE
IPTTLVDDFILSPVVKRSFIQSIKVINAIIKKYGLPNDIIIELAREKNSKDAQKMINEMQKRNRQTNE
RIEEIIRTTGKENAKYLIEKIKLHDMQEGKCLYSLEAIPLEDLLNNPFNYEVDHIIPRSVSFDNSFNN
KVLVKQEENSKKGNRTPFQYLSSSDSKISYETFKKHILNLAKGKGRISKTKKEYLLEERDINRFSV
QKDFINRNLVDTRYATRGLMNLLRSYFRVNNLDVKVKSINGGFTSFLRRKWKFKKERNKGYKHH
AEDALIIANADFIFKEWKKLDKAKKVMENQMFEEKQAESMPEIETEQEYKEIFITPHQIKHIKDFK
DYKYSHRVDKKPNRELINDTLYSTRKDDKGNTLIVNNLNGLYDKDNDKLKKLINKSPEKLLMYH
HDPQTYQKLKLIMEQYGDEKNPLYKYYEETGNYLTKYSKKDNGPVIKKIKYYGNKLNAHLDITD
DYPNSRNKVVKLSLKPYRFDVYLDNGVYKFVTVKNLDVIKKENYYEVNSKCYEEAKKLKKISN
QAEFIASFYNNDLIKINGELYRVIGVNNDLLNRIEVNMIDITYREYLENMNDKRPPRIIKTIASKTQS
IKKYSTDILGNLYEVKSKKHPQIIKKGSGGSKRTADGSEFEPKKKRKV
SaKKH-ABE8e-dimer
(SEQ ID NO: 182)
MKRTADGSEFESPKKKRKVSEVEFSHEYWMRHALTLAKRAWDEREVPVGAVLVHNNRVIGEGW
NRPIGRHDPTAHAEIMALRQGGLVMQNYRLIDATLYVTLEPCVMCAGAMIHSRIGRVVFGARDA
KTGAAGSLMDVLHHPGMNHRVEITEGILADECAALLSDFFRMRRQEIKAQKKAQSSTDSGGSSG
GSSGSETPGTSESATPESSGGSSGGSSEVEFSHEYWMRHALTLAKRARDEREVPVGAVLVLNNRVI
GEGWNRAIGLHDPTAHAEIMALRQGGLVMQNYRLIDATLYVTFEPCVMCAGAMIHSRIGRVVFG
VRNSKRGAAGSLMNVLNYPGMNHRVEITEGILADECAALLCDFYRMPRQVFNAQKKAQSSINS
GGSSGGSSGSETPGTSESATPESSGGSSGGSGKRNYILGLAIGITSVGYGIIDYETRDVIDAGVRLFK
EANVENNEGRRSKRGARRLKRRRRHRIQRVKKLLFDYNLLTDHSELSGINPYEARVKGLSQKLSE
EEFSAALLHLAKRRGVHNVNEVEEDTGNELSTKEQISRNSKALEEKYVAELQLERLKKDGEVRG
SINRFKTSDYVKEAKQLLKVQKAYHQLDQSFIDTYIDLLETRRTYYEGPGEGSPFGWKDIKEWYE
MLMGHCTYFPEELRSVKYAYNADLYNALNDLNNLVITRDENEKLEYYEKFQIIENVFKQKKKPT
LKQIAKEILVNEEDIKGYRVTSTGKPEFTNLKVYHDIKDITARKEIIENAELLDQIAKILTIYQSSEDI
QEELTNLNSELTQEEIEQISNLKGYTGTHNLSLKAINLILDELWHTNDNQIAIFNRLKLVPKKVDLS
QQKEIPTTLVDDFILSPVVKRSFIQSIKVINAIIKKYGLPNDIIIELAREKNSKDAQKMINEMQKRNR
QTNERIEEIIRTTGKENAKYLIEKIKLHDMQEGKCLYSLEAIPLEDLLNNPFNYEVDHIIPRSVSFDN
SFNNKVLVKQEENSKKGNRTPFQYLSSSDSKISYETFKKHILNLAKGKGRISKTKKEYLLEERDIN
RFSVQKDFINRNLVDTRYATRGLMNLLRSYFRVNNLDVKVKSINGGFTSFLRRKWKFKKERNKG
YKHHAEDALIIANADFIFKEWKKLDKAKKVMENQMFEEKQAESMPEIETEQEYKEIFITPHQIKHI
KDFKDYKYSHRVDKKPNRELINDTLYSTRKDDKGNTLIVNNLNGLYDKDNDKLKKLINKSPEKL
LMYHHDPQTYQKLKLIMEQYGDEKNPLYKYYEETGNYLTKYSKKDNGPVIKKIKYYGNKLNAH
LDITDDYPNSRNKVVKLSLKPYRFDVYLDNGVYKFVTVKNLDVIKKENYYEVNSKCYEEAKKL
KKISNQAEFIASFYNNDLIKINGELYRVIGVNNDLLNRIEVNMIDITYREYLENMNDKRPPRIIKTIA
SKTQSIKKYSTDILGNLYEVKSKKHPQIIKKGSGGSKRTADGSEFEPKKKRKV
CP1028-ABE8e
(SEQ ID NO: 183)
MKRTADGSEFESPKKKRKVSEVEFSHEYWMRHALTLAKRARDEREVPVGAVLVLNNRVIGEGW
NRAIGLHDPTAHAEIMALRQGGLVMQNYRLIDATLYVTFEPCVMCAGAMIHSRIGRVVFGVRNS
KRGAAGSLMNVLNYPGMNHRVEITEGILADECAALLCDFYRMPRQVFNAQKKAQSSINSGGSSG
GSSGSETPGTSESATPESSGGSSGGSEIGKATAKYFFYSNIMNFFKTEITLANGEIRKRPLIETNGET
GEIVWDKGRDFATVRKVLSMPQVNIVKKTEVQTGGFSKESILPKRNSDKLIARKKDWDPKKYGG
FDSPTVAYSVLVVAKVEKGKSKKLKSVKELLGITIMERSSFEKNPIDFLEAKGYKEVKKDLIIKLPK
YSLFELENGRKRMLASAGELQKGNELALPSKYVNFLYLASHYEKLKGSPEDNEQKQLFVEQHKH
YLDEIIEQISEFSKRVILADANLDKVLSAYNKHRDKPIREQAENIIHLFTLTNLGAPAAFKYFDTTID
RKRYTSTKEVLDATLIHQSITGLYETRIDLSQLGGDGGSGGSGGSGGSGGSGGSGGMDKKYSIGL
AIGTNSVGWAVITDEYKVPSKKFKVLGNTDRHSIKKNLIGALLFDSGETAEATRLKRTARRRYTRR
KNRICYLQEIFSNEMAKVDDSFFHRLEESFLVEEDKKHERHPIFGNIVDEVAYHEKYPTIYHLRKK
LVDSTDKADLRLIYLALAHMIKFRGHFLIEGDLNPDNSDVDKLFIQLVQTYNQLFEENPINASGVD
AKAILSARLSKSRRLENLIAQLPGEKKNGLFGNLIALSLGLTPNFKSNFDLAEDAKLQLSKDTYDD
DLDNLLAQIGDQYADLFLAAKNLSDAILLSDILRVNTEITKAPLSASMIKRYDEHHQDLTLLKALV
RQQLPEKYKEIFFDQSKNGYAGYIDGGASQEEFYKFIKPILEKMDGTEELLVKLNREDLLRKQRTF
DNGSIPHQIHLGELHAILRRQEDFYPFLKDNREKIEKILTFRIPYYVGPLARGNSRFAWMTRKSEET
ITPWNFEEVVDKGASAQSFIERMTNFDKNLPNEKVLPKHSLLYEYFTVYNELTKVKYVTEGMRK
PAFLSGEQKKAIVDLLFKTNRKVTVKQLKEDYFKKIECFDSVEISGVEDRFNASLGTYHDLLKIIK
DKDFLDNEENEDILEDIVLTLTLFEDREMIEERLKTYAHLFDDKVMKQLKRRRYTGWGRLSRKLI
NGIRDKQSGKTILDFLKSDGFANRNFMQLIHDDSLTFKEDIQKAQVSGQGDSLHEHIANLAGSPAI
KKGILQTVKVVDELVKVMGRHKPENIVIEMARENQTTQKGQKNSRERMKRIEEGIKELGSQILKE
HPVENTQLQNEKLYLYYLQNGRDMYVDQELDINRLSDYDVDHIVPQSFLKDDSIDNKVLTRSDK
NRGKSDNVPSEEVVKKMKNYWRQLLNAKLITQRKFDNLTKAERGGLSELDKAGFIKRQLVETR
QITKHVAQILDSRMNTKYDENDKLIREVKVITLKSKLVSDFRKDFQFYKVREINNYHHAHDAYLN
AVVGTALIKKYPKLESEFVYGDYKVYDVRKMIAKSEQSGGSKRTADGSEFEPKKKRKV
CP1028-ABE8e-dimer
(SEQ ID NO: 184)
MKRTADGSEFESPKKKRKVSEVEFSHEYWMRHALTLAKRAWDEREVPVGAVLVHNNRVIGEGW
NRPIGRHDPTAHAEIMALRQGGLVMQNYRLIDATLYVTLEPCVMCAGAMIHSRIGRVVFGARDA
KTGAAGSLMDVLHHPGMNHRVEITEGILADECAALLSDFFRMRRQEIKAQKKAQSSTDSGGSSG
GSSGSETPGTSESATPESSGGSSGGSSEVEFSHEYWMRHALTLAKRARDEREVPVGAVLVLNNRVI
GEGWNRAIGLHDPTAHAEIMALRQGGLVMQNYRLIDATLYVTFEPCVMCAGAMIHSRIGRVVFG
VRNSKRGAAGSLMNVLNYPGMNHRVEITEGILADECAALLCDFYRMPRQVFNAQKKAQSSINS
GGSSGGSSGSETPGTSESATPESSGGSSGGSEIGKATAKYFFYSNIMNFFKTEITLANGEIRKRPLIET
NGETGEIVWDKGRDFATVRKVLSMPQVNIVKKTEVQTGGFSKESILPKRNSDKLIARKKDWDPK
KYGGFDSPTVAYSVLVVAKVEKGKSKKLKSVKELLGITIMERSSFEKNPIDFLEAKGYKEVKKDLI
IKLPKYSLFELENGRKRMLASAGELQKGNELALPSKYVNFLYLASHYEKLKGSPEDNEQKQLFV
EQHKHYLDEIIEQISEFSKRVILADANLDKVLSAYNKHRDKPIREQAENIIHLFTLTNLGAPAAFKY
FDTTIDRKRYTSTKEVLDATLIHQSITGLYETRIDLSQLGGDGGSGGSGGSGGSGGSGGSGGMDK
KYSIGLAIGTNSVGWAVITDEYKVPSKKFKVLGNTDRHSIKKNLIGALLFDSGETAEATRLKRTAR
RRYTRRKNRICYLQEIFSNEMAKVDDSFFHRLEESFLVEEDKKHERHPIFGNIVDEVAYHEKYPTI
YHLRKKLVDSTDKADLRLIYLALAHMIKFRGHFLIEGDLNPDNSDVDKLFIQLVQTYNQLFEENPI
NASGVDAKAILSARLSKSRRLENLIAQLPGEKKNGLFGNLIALSLGLTPNFKSNFDLAEDAKLQLS
KDTYDDDLDNLLAQIGDQYADLFLAAKNLSDAILLSDILRVNTEITKAPLSASMIKRYDEHHQDL
TLLKALVRQQLPEKYKEIFFDQSKNGYAGYIDGGASQEEFYKFIKPILEKMDGTEELLVKLNREDL
LRKQRTFDNGSIPHQIHLGELHAILRRQEDFYPFLKDNREKIEKILTFRIPYYVGPLARGNSRFAWM
TRKSEETITPWNFEEVVDKGASAQSFIERMTNFDKNLPNEKVLPKHSLLYEYFTVYNELTKVKYV
TEGMRKPAFLSGEQKKAIVDLLFKTNRKVTVKQLKEDYFKKIECFDSVEISGVEDRFNASLGTYH
DLLKIIKDKDFLDNEENEDILEDIVLTLTLFEDREMIEERLKTYAHLFDDKVMKQLKRRRYTGWG
RLSRKLINGIRDKQSGKTILDFLKSDGFANRNFMQLIHDDSLTFKEDIQKAQVSGQGDSLHEHIAN
LAGSPAIKKGILQTVKVVDELVKVMGRHKPENIVIEMARENQTTQKGQKNSRERMKRIEEGIKEL
GSQILKEHPVENTQLQNEKLYLYYLQNGRDMYVDQELDINRLSDYDVDHIVPQSFLKDDSIDNK
VLTRSDKNRGKSDNVPSEEVVKKMKNYWRQLLNAKLITQRKFDNLTKAERGGLSELDKAGFIK
RQLVETRQITKHVAQILDSRMNTKYDENDKLIREVKVITLKSKLVSDFRKDFQFYKVREINNYHH
AHDAYLNAVVGTALIKKYPKLESEFVYGDYKVYDVRKMIAKSEQSGGSKRTADGSEFEPKKKRK
V
CP1041-ABE8e
(SEQ ID NO: 185)
MKRTADGSEFESPKKKRKVSEVEFSHEYWMRHALTLAKRARDEREVPVGAVLVLNNRVIGEGW
NRAIGLHDPTAHAEIMALRQGGLVMQNYRLIDATLYVTFEPCVMCAGAMIHSRIGRVVFGVRNS
KRGAAGSLMNVLNYPGMNHRVEITEGILADECAALLCDFYRMPRQVFNAQKKAQSSINSGGSSG
GSSGSETPGTSESATPESSGGSSGGSNIMNFFKTEITLANGEIRKRPLIETNGETGEIVWDKGRDFAT
VRKVLSMPQVNIVKKTEVQTGGFSKESILPKRNSDKLIARKKDWDPKKYGGFDSPTVAYSVLVV
AKVEKGKSKKLKSVKELLGITIMERSSFEKNPIDFLEAKGYKEVKKDLIIKLPKYSLFELENGRKR
MLASAGELQKGNELALPSKYVNFLYLASHYEKLKGSPEDNEQKQLFVEQHKHYLDEIIEQISEFS
KRVILADANLDKVLSAYNKHRDKPIREQAENIIHLFTLTNLGAPAAFKYFDTTIDRKRYTSTKEVL
DATLIHQSITGLYETRIDLSQLGGDGGSGGSGGSGGSGGSGGSGGDKKYSIGLAIGTNSVGWAVIT
DEYKVPSKKFKVLGNTDRHSIKKNLIGALLFDSGETAEATRLKRTARRRYTRRKNRICYLQEIFSN
EMAKVDDSFFHRLEESFLVEEDKKHERHPIFGNIVDEVAYHEKYPTIYHLRKKLVDSTDKADLRLI
YLALAHMIKFRGHFLIEGDLNPDNSDVDKLFIQLVQTYNQLFEENPINASGVDAKAILSARLSKSR
RLENLIAQLPGEKKNGLFGNLIALSLGLTPNFKSNFDLAEDAKLQLSKDTYDDDLDNLLAQIGDQ
YADLFLAAKNLSDAILLSDILRVNTEITKAPLSASMIKRYDEHHQDLTLLKALVRQQLPEKYKEIFF
DQSKNGYAGYIDGGASQEEFYKFIKPILEKMDGTEELLVKLNREDLLRKQRTFDNGSIPHQIHLGE
LHAILRRQEDFYPFLKDNREKIEKILTFRIPYYVGPLARGNSRFAWMTRKSEETITPWNFEEVVDK
GASAQSFIERMTNFDKNLPNEKVLPKHSLLYEYFTVYNELTKVKYVTEGMRKPAFLSGEQKKAIV
DLLFKTNRKVTVKQLKEDYFKKIECFDSVEISGVEDRFNASLGTYHDLLKIIKDKDFLDNEENEDI
LEDIVLTLTLFEDREMIEERLKTYAHLFDDKVMKQLKRRRYTGWGRLSRKLINGIRDKQSGKTIL
DFLKSDGFANRNFMQLIHDDSLTFKEDIQKAQVSGQGDSLHEHIANLAGSPAIKKGILQTVKVVD
ELVKVMGRHKPENIVIEMARENQTTQKGQKNSRERMKRIEEGIKELGSQILKEHPVENTQLQNEK
LYLYYLQNGRDMYVDQELDINRLSDYDVDHIVPQSFLKDDSIDNKVLTRSDKNRGKSDNVPSEE
VVKKMKNYWRQLLNAKLITQRKFDNLTKAERGGLSELDKAGFIKRQLVETRQITKHVAQILDSR
MNTKYDENDKLIREVKVITLKSKLVSDFRKDFQFYKVREINNYHHAHDAYLNAVVGTALIKKYP
KLESEFVYGDYKVYDVRKMIAKSEQEIGKATAKYFFYSSGGSKRTADGSEFEPKKKRKV
ABE8e(TadA-8e V82G)
(SEQ ID NO: 186)
MKRTADGSEFESPKKKRKVSEVEFSHEYWMRHALTLAKRARDEREVPVGAVLVLNNRVIGEGW
NRAIGLHDPTAHAEIMALRQGGLVMQNYRLIDATLYVTFEPCVMCAGAMIHSRIGRVVFGVRNS
KRGAAGSLMNVLNYPGMNHRVEITEGILADECAALLCDFYRMPRQVFNAQKKAQSSINSGGSSG
GSSGSETPGTSESATPESSGGSSGGSDKKYSIGLAIGTNSVGWAVITDEYKVPSKKFKVLGNTDRH
SIKKNLIGALLFDSGETAEATRLKRTARRRYTRRKNRICYLQEIFSNEMAKVDDSFFHRLEESFLVE
EDKKHERHPIFGNIVDEVAYHEKYPTIYHLRKKLVDSTDKADLRLIYLALAHMIKFRGHFLIEGDL
NPDNSDVDKLFIQLVQTYNQLFEENPINASGVDAKAILSARLSKSRRLENLIAQLPGEKKNGLFGN
LIALSLGLTPNFKSNFDLAEDAKLQLSKDTYDDDLDNLLAQIGDQYADLFLAAKNLSDAILLSDIL
RVNTEITKAPLSASMIKRYDEHHQDLTLLKALVRQQLPEKYKEIFFDQSKNGYAGYIDGGASQEEF
YKFIKPILEKMDGTEELLVKLNREDLLRKQRTFDNGSIPHQIHLGELHAILRRQEDFYPFLKDNRE
KIEKILTFRIPYYVGPLARGNSRFAWMTRKSEETITPWNFEEVVDKGASAQSFIERMTNFDKNLPN
EKVLPKHSLLYEYFTVYNELTKVKYVTEGMRKPAFLSGEQKKAIVDLLFKTNRKVTVKQLKEDY
FKKIECFDSVEISGVEDRFNASLGTYHDLLKIIKDKDFLDNEENEDILEDIVLTLTLFEDREMIEERL
KTYAHLFDDKVMKQLKRRRYTGWGRLSRKLINGIRDKQSGKTILDFLKSDGFANRNFMQLIHDD
SLTFKEDIQKAQVSGQGDSLHEHIANLAGSPAIKKGILQTVKVVDELVKVMGRHKPENIVIEMAR
ENQTTQKGQKNSRERMKRIEEGIKELGSQILKEHPVENTQLQNEKLYLYYLQNGRDMYVDQELD
INRLSDYDVDHIVPQSFLKDDSIDNKVLTRSDKNRGKSDNVPSEEVVKKMKNYWRQLLNAKLIT
QRKFDNLTKAERGGLSELDKAGFIKRQLVETRQITKHVAQILDSRMNTKYDENDKLIREVKVITL
KSKLVSDFRKDFQFYKVREINNYHHAHDAYLNAVVGTALIKKYPKLESEFVYGDYKVYDVRKMI
AKSEQEIGKATAKYFFYSNIMNFFKTEITLANGEIRKRPLIETNGETGEIVWDKGRDFATVRKVLS
MPQVNIVKKTEVQTGGFSKESILPKRNSDKLIARKKDWDPKKYGGFDSPTVAYSVLVVAKVEKG
KSKKLKSVKELLGITIMERSSFEKNPIDFLEAKGYKEVKKDLIIKLPKYSLFELENGRKRMLASAG
ELQKGNELALPSKYVNFLYLASHYEKLKGSPEDNEQKQLFVEQHKHYLDEIIEQISEFSKRVILAD
ANLDKVLSAYNKHRDKPIREQAENIIHLFTLTNLGAPAAFKYFDTTIDRKRYTSTKEVLDATLIHQ
SITGLYETRIDLSQLGGDSGGSKRTADGSEFEPKKKRKV
ABE8e(TadA-8e K20A, R21A)
(SEQ ID NO: 187)
MKRTADGSEFESPKKKRKVSEVEFSHEYWMRHALTLAKRARDEREVPVGAVLVLNNRVIGEGW
NRAIGLHDPTAHAEIMALRQGGLVMQNYRLIDATLYVTFEPCVMCAGAMIHSRIGRVVFGVRNS
KRGAAGSLMNVLNYPGMNHRVEITEGILADECAALLCDFYRMPRQVFNAQKKAQSSINSGGSSG
GSSGSETPGTSESATPESSGGSSGGSDKKYSIGLAIGTNSVGWAVITDEYKVPSKKFKVLGNTDRH
SIKKNLIGALLFDSGETAEATRLKRTARRRYTRRKNRICYLQEIFSNEMAKVDDSFFHRLEESFLVE
EDKKHERHPIFGNIVDEVAYHEKYPTIYHLRKKLVDSTDKADLRLIYLALAHMIKFRGHFLIEGDL
NPDNSDVDKLFIQLVQTYNQLFEENPINASGVDAKAILSARLSKSRRLENLIAQLPGEKKNGLFGN
LIALSLGLTPNFKSNFDLAEDAKLQLSKDTYDDDLDNLLAQIGDQYADLFLAAKNLSDAILLSDIL
RVNTEITKAPLSASMIKRYDEHHQDLTLLKALVRQQLPEKYKEIFFDQSKNGYAGYIDGGASQEEF
YKFIKPILEKMDGTEELLVKLNREDLLRKQRTFDNGSIPHQIHLGELHAILRRQEDFYPFLKDNRE
KIEKILTFRIPYYVGPLARGNSRFAWMTRKSEETITPWNFEEVVDKGASAQSFIERMTNFDKNLPN
EKVLPKHSLLYEYFTVYNELTKVKYVTEGMRKPAFLSGEQKKAIVDLLFKTNRKVTVKQLKEDY
FKKIECFDSVEISGVEDRFNASLGTYHDLLKIIKDKDFLDNEENEDILEDIVLTLTLFEDREMIEERL
KTYAHLFDDKVMKQLKRRRYTGWGRLSRKLINGIRDKQSGKTILDFLKSDGFANRNFMQLIHDD
SLTFKEDIQKAQVSGQGDSLHEHIANLAGSPAIKKGILQTVKVVDELVKVMGRHKPENIVIEMAR
ENQTTQKGQKNSRERMKRIEEGIKELGSQILKEHPVENTQLQNEKLYLYYLQNGRDMYVDQELD
INRLSDYDVDHIVPQSFLKDDSIDNKVLTRSDKNRGKSDNVPSEEVVKKMKNYWRQLLNAKLIT
QRKFDNLTKAERGGLSELDKAGFIKRQLVETRQITKHVAQILDSRMNTKYDENDKLIREVKVITL
KSKLVSDFRKDFQFYKVREINNYHHAHDAYLNAVVGTALIKKYPKLESEFVYGDYKVYDVRKMI
AKSEQEIGKATAKYFFYSNIMNFFKTEITLANGEIRKRPLIETNGETGEIVWDKGRDFATVRKVLS
MPQVNIVKKTEVQTGGFSKESILPKRNSDKLIARKKDWDPKKYGGFDSPTVAYSVLVVAKVEKG
KSKKLKSVKELLGITIMERSSFEKNPIDFLEAKGYKEVKKDLIIKLPKYSLFELENGRKRMLASAG
ELQKGNELALPSKYVNFLYLASHYEKLKGSPEDNEQKQLFVEQHKHYLDEIIEQISEFSKRVILAD
ANLDKVLSAYNKHRDKPIREQAENIIHLFTLTNLGAPAAFKYFDTTIDRKRYTSTKEVLDATLIHQ
SITGLYETRIDLSQLGGDSGGSKRTADGSEFEPKKKRKV
ABE8e(TadA-8e V106W)
(SEQ ID NO: 188)
MKRTADGSEFESPKKKRKVSEVEFSHEYWMRHALTLAKRARDEREVPVGAVLVLNNRVIGEGW
NRAIGLHDPTAHAEIMALRQGGLVMQNYRLIDATLYVTFEPCVMCAGAMIHSRIGRVVFGWRNS
KRGAAGSLMNVLNYPGMNHRVEITEGILADECAALLCDFYRMPRQVFNAQKKAQSSINSGGSSG
GSSGSETPGTSESATPESSGGSSGGSDKKYSIGLAIGTNSVGWAVITDEYKVPSKKFKVLGNTDRH
SIKKNLIGALLFDSGETAEATRLKRTARRRYTRRKNRICYLQEIFSNEMAKVDDSFFHRLEESFLVE
EDKKHERHPIFGNIVDEVAYHEKYPTIYHLRKKLVDSTDKADLRLIYLALAHMIKFRGHFLIEGDL
NPDNSDVDKLFIQLVQTYNQLFEENPINASGVDAKAILSARLSKSRRLENLIAQLPGEKKNGLFGN
LIALSLGLTPNFKSNFDLAEDAKLQLSKDTYDDDLDNLLAQIGDQYADLFLAAKNLSDAILLSDIL
RVNTEITKAPLSASMIKRYDEHHQDLTLLKALVRQQLPEKYKEIFFDQSKNGYAGYIDGGASQEEF
YKFIKPILEKMDGTEELLVKLNREDLLRKQRTFDNGSIPHQIHLGELHAILRRQEDFYPFLKDNRE
KIEKILTFRIPYYVGPLARGNSRFAWMTRKSEETITPWNFEEVVDKGASAQSFIERMTNFDKNLPN
EKVLPKHSLLYEYFTVYNELTKVKYVTEGMRKPAFLSGEQKKAIVDLLFKTNRKVTVKQLKEDY
FKKIECFDSVEISGVEDRFNASLGTYHDLLKIIKDKDFLDNEENEDILEDIVLTLTLFEDREMIEERL
KTYAHLFDDKVMKQLKRRRYTGWGRLSRKLINGIRDKQSGKTILDFLKSDGFANRNFMQLIHDD
SLTFKEDIQKAQVSGQGDSLHEHIANLAGSPAIKKGILQTVKVVDELVKVMGRHKPENIVIEMAR
ENQTTQKGQKNSRERMKRIEEGIKELGSQILKEHPVENTQLQNEKLYLYYLQNGRDMYVDQELD
INRLSDYDVDHIVPQSFLKDDSIDNKVLTRSDKNRGKSDNVPSEEVVKKMKNYWRQLLNAKLIT
QRKFDNLTKAERGGLSELDKAGFIKRQLVETRQITKHVAQILDSRMNTKYDENDKLIREVKVITL
KSKLVSDFRKDFQFYKVREINNYHHAHDAYLNAVVGTALIKKYPKLESEFVYGDYKVYDVRKMI
AKSEQEIGKATAKYFFYSNIMNFFKTEITLANGEIRKRPLIETNGETGEIVWDKGRDFATVRKVLS
MPQVNIVKKTEVQTGGFSKESILPKRNSDKLIARKKDWDPKKYGGFDSPTVAYSVLVVAKVEKG
KSKKLKSVKELLGITIMERSSFEKNPIDFLEAKGYKEVKKDLIIKLPKYSLFELENGRKRMLASAG
ELQKGNELALPSKYVNFLYLASHYEKLKGSPEDNEQKQLFVEQHKHYLDEIIEQISEFSKRVILAD
ANLDKVLSAYNKHRDKPIREQAENIIHLFTLTNLGAPAAFKYFDTTIDRKRYTSTKEVLDATLIHQ
SITGLYETRIDLSQLGGDSGGSKRTADGSEFEPKKKRKV
ABE8e-NRTH dimer editor: NLS, wtTadA, linker, TadA*, SpCas9-NRTH
(SEQ ID NO: 449)
MKRTADGSEFESPKKKRKVSEVEFSHEYWMRHALTLAKRAWDEREVPVGAVLVHNNRVIGE
GWNRPIGRHDPTAHAEIMALRQGGLVMQNYRLIDATLYVTLEPCVMCAGAMIHSRIGRVV
FGARDAKTGAAGSLMDVLHHPGMNHRVEITEGILADECAALLSDFFRMRRQEIKAQKKAQ
SSTDSGGSSGGSSGSETPGTSESATPESSGGSSGGSSEVEFSHEYWMRHALTLAKRARDEREVPVG
AVLVLNNRVIGEGWNRAIGLHDPTAHAEIMALRQGGLVMQNYRLIDATLYVTFEPCVMCAGAMIHSRIG
RVVFGVRNSKRGAAGSLMNVLNYPGMNHRVEITEGILADECAALLCDFYRMPRQVFNAQKKAQSSINS
GGSSGGSSGSYTPGTSYSKYPYSSGGSSGGSDKKYSIGLAIGTNSVGWAVITDEYKVPSKKFKVLGNTD
RHSIKKNLIGALLFDSGETAEATRLKRTARRRYTRRKNRICYLQEIFSNEMAKVDDSFFHRLEESFLVEED
KKHERHPIFGNIVDEVAYHEKYPTIYHLRKKLVDSTDKADLRLIYLALAHMIKFRGHFLIEGDLNPDNSD
VDKLFIQLVQTYNQLFEENPINASGVDAKAILSARLSKSRRLENLIAQLPGEKKNGLFGNLIALSLGLTPN
FKSNFDLAEDAKLQLSKDTYDDDLDNLLAQIGDQYADLFLAAKNLSDAILLSDILRVNTEITKAPLSASM
VKRYDEHHQDLTLLKALVRQQLPEKYKEIFFDQSKNGYAGYIDGGASQEEFYKFIKPILEKMDGTEELL
VKLNREDLLRKQRTFDNGIIPHQIHLGELHAILRRQGDFYPFLKDNREKIEKILTFRIPYYVGPLARGNS
RFAWMTRKSEETITPWNFEEWDKGASAQSFIERMTNFDKNLPNEKVLPKHSLLYEYFTVYNELTKVKY
VTEGMRKPAFLSGEQKKAIVDLLFKTNRKVTVKQLKEDYFKKIECFDSVEISGVEDRFNASLGTYHDLL
KIIKDKDFLDNEENEDILEDIVLTLTLFEDREMIEERLKTYAHLFDDKVMKQLKRLRYTGWGRLSRKLIN
GIRDKQSGKTILDFLKSDGFANRNFMQLIHDDSLTFKEDIQKAQVSCQGDSLHEHIANLAGSPAIKKGI
LQTVKVVDELIKVMGGHKPENIVIEMARENQTTQKGQKNSRERMKRIEEGIKELGSQILKEHPVENTQ
LQNEKLYLYYLQNGRDMYVDQELDINRLSDYDVDHIVPQSFLKDDSIENKVLTRSDKNRGKSDNVPSE
EVVKKMKNYWRQLLNAKLITQRKFDNLTKAERGGLSELDKAGFIKRQLAETRQITKHVAQILDSRMNT
KYDENDKLIREVKVITLKSKLVSDFRKDFQFYKVREINNYHHAHDAYLNAVVGTALIKKYPKLESEFVYG
DYKVYDVRKMIAKSEQEIGKATAKYFFYSNIMNFFKTEITLANGEIRKRPLIETNGETGEIVWDKGRDFA
TVRKVLSMPQVNIVKKTEVQTGGFSKESILPKGNSDKLIARKKDWDPKKYGGFNSPTVAYSVLVVAKVE
KGKSKKLKSVKELLGITIMERSSFEKNPIGFLEAKGYKEVKKDLIIKLPKYSLFELENGRKRMLASASVL
HKGNELALPSKYVNFLYLASHYEKLKGSSEDNKQKQLFVEQHKHYLDEIIEQISEFSKRVILADANLDKV
LSAYNKHRDKPIREQAENIIHLFTLTNLGASAAFKYFDTTIGRKLYTSTKEVLDATLIHQSITGLYETRIDLS
QLGGDSGGSKRTADGSEFEPKKKRKV
ABE8e-NRTH monomer editor: NLS, linker, TadA*, SpCas9-NRTH
(SEQ ID NO: 465)
MKRTADGSEFESPKKKRKVSEVEFSHEYWMRHALTLAKRARDEREVPVGAVLVLNNRVIGEGWNRAI
GLHDPTAHAEIMALRQGGLVMQNYRLIDATLYVTFEPCVMCAGAMIHSRIGRVVFGVRNSKRGAAGSL
MNVLNYPGMNHRVEITEGILADECAALLCDFYRMPRQVFNAQKKAQSSINSGGSSGGSSGSETPGTSES
ATPESSGGSSGGSDKKYSIGLAIGTNSVGWAVITDEYKVPSKKFKVLGNTDRHSIKKNLIGALLFDSGET
AEATRLKRTARRRYTRRKNRICYLQEIFSNEMAKVDDSFFHRLEESFLVEEDKKHERHPIFGNIVDEVAY
HEKYPTIYHLRKKLVDSTDKADLRLIYLALAHMIKFRGHFLIEGDLNPDNSDVDKLFIQLVQTYNQLFE
ENPINASGVDAKAILSARLSKSRRLENLIAQLPGEKKNGLFGNLIALSLGLTPNFKSNFDLAEDAKLQLS
KDTYDDDLDNLLAQIGDQYADLFLAAKNLSDAILLSDILRVNTEITKAPLSASMVKRYDEHHQDLTLLK
ALVRQQLPEKYKEIFFDQSKNGYAGYIDGGASQEEFYKFIKPILEKMDGTEELLVKLNREDLLRKQRTF
DNGIIPHQIHLGELHAILRRQGDFYPFLKDNREKIEKILTFRIPYYVGPLARGNSRFAWMTRKSEETITPW
NFEEVVDKGASAQSFIERMTNFDKNLPNEKVLPKHSLLYEYFTVYNELTKVKYVFEGMRKPAFLSGEQ
KKAIVDLLFKTNRKVTVKQLKEDYFKKIECFDSVEISGVEDRFNASLGTYHDLLKIIKDKDFLDNEENE
DILEDIVLTLTLFEDREMIEERLKTYAHLFDDKVMKQLKRLRYTGWGRLSRKLINGIRDKQSGKTILDFL
KSDGFANRNFMQLIHDDSLTFKEDIQKAQVSCQGDSLHEHIANLAGSPAIKKGILQTVKVVDELIKVMG
GHKPENIVIEMARENQTTQKGQKNSRERMKRIEEGIKELGSQILKEHPVENTQLQNEKLYLYYLQNGR
DMYVDQELDINRLSDYDVDHIVPQSFLKDDSIENKVLTRSDKNRGKSDNVPSEEVVKKMKNYWRQLLN
AKLITQRKFDNLTKAERGGLSELDKAGFIKRQLAETRQITKHVAQILDSRMNTKYDENDKLIREVKVITL
KSKLVSDFRKDFQFYKVREINNYHHAHDAYLNAVVGTALIKKYPKLESEFVYGDYKVYDVRKMIAKSEQ
EIGKATAKYFFYSNIMNFFKTEITLANGEIRKRPLIETNGETGEIVWDKGRDFATVRKVLSMPQVNIVKK
TEVQTGGFSKESILPKGNSDKLIARKKDWDPKKYGGFNSPTVAYSVLWAKVEKGKSKKLKSVKELLGI
TIMERSSFEKNPIGFLEAKGYKEVKKDLIIKLPKYSLFELENGRKRMLASASVLHKGNELALPSKYVNFL
YLASHYEKLKGSSEDNKQKQLFVEQHKHYLDEIIEQISEFSKRVILADANLDKVLSAYNKHRDKPIREQA
ENIIHLFTLTNLGASAAFKYFDTTIGRKLYTSTKEVLDATLIHQSITGLYETRIDLSQLGGDSGGSKRTAD
GSEFEPKKKRKV
ABE8e-SpyMac dimer editor: NLS, wtTadA, linker, TadA*, SpCas9-SpyMac
(SEQ ID NO: 450)
MKRTADGSEFESPKKKRKVSEVEFSHEYWMRHALTLAKRAWDEREVPVGAVLVHNNRVIGE
GWNRPIGRHDPTAHAEIMALRQGGLVMQNYRLIDATLYVTLEPCVMCAGAMIHSRIGRVV
FGARDAKTGAAGSLMDVLHHPGMNHRVEITEGILADECAALLSDFFRMRRQEIKAQKKAQ
SSTDSGGSSGGSSGSETPGTSESATPESSGGSSGGSSEVEFSHEYWMRHALTLAKRARDEREVPVGAV
LVLNNRVIGEGWNRAIGLHDPTAHAEIMALRQGGLVMQNYRLIDATLYVFFEPCVMCAGAMIHSRIGRV
VFGVRNSKRGAAGSLMNVLNYPGMNHRVEITEGILADECAALLCDFYRMPRQVFNAQKKAQSSINSGG
SSGGSSGSETPGTSESATPESSGGSSGGSDKKYSIGLAIGTNSVGWAVITDEYKVPSKKFKVLGNTDRH
SIKKNLIGALLFDSGETAEATRLKRTARRRYTRRKNRICYLQEIFSNEMAKVDDSFFHRLEESFLVEEDKK
HERHPIFGNIVDEVAYHEKYPTIYHLRKKLVDSTDKADLRLIYLALAHMIKFRGHFLIEGDLNPDNSDVD
KLFIQLVQTYNQLFEENPINASGVDAKAILSARLSKSRRLENLIAQLPGEKKNGLFGNLIALSLGLTPNFK
SNFDLAEDAKLQLSKDTYDDDLDNLLAQIGDQYADLFLAAKNLSDAILLSDILRVNTEITKAPLSASMIK
RYDEHHQDLTLLKALVRQQLPEKYKEIFFDQSKNGYAGYIDGGASQEEFYKFIKPILEKMDGTEELLVK
LNREDLLRKQRTFDNGSIPHQIHLGELHAILRRQEDFYPFLKDNREKIEKILTFRIPYYVGPLARGNSRF
AWMTRKSEETITPWNFEEVVDKGASAQSFIERMTNFDKNLPNEKVLPKHSLLYEYFTVYNELTKVKYVT
EGMRKPAFLSGEQKKAIVDLLFKTNRKVTVKQLKEDYFKKIECFDSVEISGVEDRFNASLGTYHDLLKII
KDKDFLDNEENEDILEDIVLTLTLFEDREMIEERLKTYAHLFDDKVMKQLKRRRYTGWGRLSRKLINGI
RDKQSGKTILDFLKSDGFANRNFMQLIHDDSLTFKEDIQKAQVSGQGDSLHEHIANLAGSPAIKKGILQ
TVKVVDELVKVMGRHKPENIVIEMARENQTTQKGQKNSRERMKRIEEGIKELGSQILKEHPVENTQLQ
NEKLYLYYLQNGRDMYVDQELDINRLSDYDVDHIVPQSFLKDDSIDNKVLTRSDKNRGKSDNVPSEEV
VKKMKNYWRQLLNAKLITQRKFDNLTKAERGGLSELDKAGFIKRQLVETRQITKHVAQILDSRMNTKY
DENDKLIREVKVITLKSKLVSDFRKDFQFYKVREINNYHHAHDAYLNAVVGTALIKKYPKLESEFVYGDY
KVYDVRKMIAKSEQEIGKATAKYFFYSNIMNFFKTEITLANGEIRKRPLIETNGETGEIVWDKGRDFATV
RKVLSMPQVNTVKKTEIQTVGQNGGLFDDNPKSPLEVFPSKLVPLKKELNPKKYGGYQKPTTAYPVLLI
TDTKQLIPISVMNKKQFEQNPVKFLRDRGYQQVGKNDFIKLPKYTLVDIGDGIKRLWASSKEIHKGNQL
WSKKSQILLYHAHHLDSDLSNDYLQNHNQQFDVLFNEIISFSKKCKLGKEHIQKIENVYSNKKNSASIE
ELAESFIKLLGFTQLGATSPFNFLGVKLNQKQYKGKKDYILPCTEGTLIRQSITGLYETRVDLSKIGEDS
GGSKRTADGSEFEPKKKRKV
ABE8e-SpyMac editor: NLS, linker, TadA*, SpCas9-SpyMac
(SEQ ID NO: 466)
MKRTADGSEFESPKKKRKVSEVEFSHEYWMRHALTLAKRARDEREVPVGAVLVLNNRVIGEGWNRAI
GLHDPTAHAEIMALRQGGLVMQNYRLIDATLYVTFEPCVMCAGAMIHSRIGRVVFGVRNSKRGAAGSL
MNVLNYPGMNHRVEITEGILADECAALLCDFYRMPRQVFNAQKKAQSSINSGGSSGGSSGSETPGTSE
SATPESSGGSSGGSDKKYSIGLAIGTNSVGWAVITDEYKVPSKKFKVLGNTDRHSIKKNLIGALLFDSGE
TAEATRLKRTARRRYTRRKNRICYLQEIFSNEMAKVDDSFFHRLEESFLVEEDKKHERHPIFGNIVDEVA
YHEKYPTIYHLRKKLVDSTDKADLRLIYLALAHMIKFRGHFLIEGDLNPDNSDVDKLFIQLVQTYNQLFE
ENPINASGVDAKAILSARLSKSRRLENLIAQLPGEKKNGLFGNLIALSLGLTPNFKSNFDLAEDAKLQLS
KDTYDDDLDNLLAQIGDQYADLFLAAKNLSDAILLSDILRVNTEITKAPLSASMIKRYDEHHQDLTLLKA
LVRQQLPEKYKEIFFDQSKNGYAGYIDGGASQEEFYKFIKPILEKMDGTEELLVKLNREDLLRKQRTFD
NGSIPHQIHLGELHAILRRQEDFYPFLKDNREKIEKILTFRIPYYVGPLARGNSRFAWMTRKSEETITPWN
FEEVVDKGASAQSFIERMTNFDKNLPNEKVLPKHSLLYEYFTVYNELTKVKYVTEGMRKPAFLSGEQK
KAIVDLLFKTNRKVTVKQLKEDYFKKIECFDSVEISGVEDRFNASLGTYHDLLKIIKDKDFLDNEENEDI
LEDIVLTLTLFEDREMIEERLKTYAHLFDDKVMKQLKRRRYTGWGRLSRKLINGIRDKQSGKTILDFLKS
DGFANRNFMQLIHDDSLTFKEDIQKAQVSGQGDSLHEHIANLAGSPAIKKGILQTVKVVDELVKVMGR
HKPENIVIEMARENQTTQKGQKNSRERMKRIEEGIKELGSQILKEHPVENTQLQNEKLYLYYLQNGRD
MYVDQELDINRLSDYDVDHIVPQSFLKDDSIDNKVLTRSDKNRGKSDNVPSEEVVKKMKNYWRQLLNA
KLITQRKFDNLTKAERGGLSELDKAGFIKRQLVETRQITKHVAQILDSRMNTKYDENDKLIREVKVITLK
SKLVSDFRKDFQFYKVREINNYHHAHDAYLNAVVGTALIKKYPKLESEFVYGDYKVYDVRKMIAKSEQE
IGKATAKYFFYSNIMNFFKTEITLANGEIRKRPLIETNGETGEIVWDKGRDFATVRKVLSMPQVNIVKKT
EIQTVGQNGGLFDDNPKSPLEVTPSKLVPLKKELNPKKYGGYQKPTTAYPVLLITDTKQLIPISVMNKK
QFEQNPVKFLRDRGYQQVGKNDFIKLPKYTLVDIGDGIKRLWASSKEIHKGNQLWSKKSQILLYHAHH
LDSDLSNDYLQNHNQQFDVLFNEIISFSKKCKLGKEHIQKIENVYSNKKNSASIEELAESFIKLLGFTQL
GATSPFNFLGVKLNQKQYKGKKDYILPCTEGTLIRQSITGLYETRVDLSKIGEDSGGSKRTADGSEFEP
KKKRKV
ABE8e-VRQR-CP1041 dimer: NLS, wtTadA, linker, TadA*, SpCas9-VRQR-CP1041
(SEQ ID NO: 451)
MKRTADGSEFESPKKKRKVSEVEFSHEYWMRHALTLAKRAWDEREVPVGAVLVHNNRVIGE
GWNRPIGRHDPTAHAEIMALRQGGLVMQNYRLIDATLYVTLEPCVMCAGAMIHSRIGRVV
FGARDAKTGAAGSLMDVLHHPGMNHRVEITEGILADECAALLSDFFRMRRQEIKAQKKAQ
SSTDSGGSSGGSSGSETPGTSESAATESSGGSSGGSSEVEFSHEYWMRHALTLAKRARDEREVPVG
AVLVLNNRVIGEGWNRAIGLHDPTAHAEIMALRQGGLVMQNYRLIDATLYVTFEPCVMCAGAMIHSRIG
RVVFGVRNSKRGAAGSLMNVLNYPGMNHRVEITEGILADECAALLCDFYRMPRQVFNAQKKAQSSINS
GGSSGGSSGSETPGTSESATPESSGGSSGGSNIMNFFKTEITLANGEIRKRPLIETNGETGEIVWDKGR
DFATVRKVLSMPQVNIVKKTEVQTGGFSKESIRPKRNSDKLIARKKDWDPKKYGGFVSPTVAYSVLWA
KVEKGKSKKLKSVKELLGITIMERSSFEKNPIDFLEAKGYKEVKKDLIIKLPKYSLFELENGRKRMLASA
RFLQKGNELALPSKYVNFLYLASHYEKLKGSPEDNEQKQLFVEQHKHYLDEIIEQISEFSKRVILADANL
DKVLSAYNKHRDKPIREQAENIIHLFTLTNLGAPRAFKYFDTTIDRKVYRSTKEVLDATLIHQSITGLYET
RIDLSQLGGDGGSGGSGGSGGSGGSGGSGGDKKYSIGLAIGTNSVGWAVITDEYKVPSKKFKVLGNTD
RHSIKKNLIGALLFDSGETAEATRLKRTARRRYTRRKNRICYLQEIFSNEMAKVDDSFFHRLEESFLVEED
KKHERHPIFGNIVDEVAYHEKYPTIYHLRKKLVDSTDKADLRLIYLALAHMIKFRGHFLIEGDLNPDNSD
VDKLFIQLVQTYNQLFEENPINASGVDAKAILSARLSKSRRLENLIAQLPGEKKNGLFGNLIALSLGLTPN
FKSNFDLAEDAKLQLSKDTYDDDLDNLLAQIGDQYADLFLAAKNLSDAILLSDILRVNTEITKAPLSASM
IKRYDEHHQDLTLLKALVRQQLPEKYKEIFFDQSKNGYAGYIDGGASQEEFYKFIKPILEKMDGTEELL
VKLNREDLLRKQRTFDNGSIPHQIHLGELHAILRRQEDFYPFLKDNREKIEKILTFRIPYYVGPLARGNS
RFAWMTRKSEETITPWNFEEVVDKGASAQSFIERMTNFDKNLPNEKVLPKHSLLYEYFTVYNELTKVKY
VTEGMRKPAFLSGEQKKAIVDLLFKTNRKVTVKQLKEDYFKKIECFDSVEISGVEDRFNASLGTYHDLL
KIIKDKDFLDNEENEDILEDIVLTLTLFEDREMIEERLKTYAHLFDDKVMKQLKRRRYTGWGRLSRKLI
NGIRDKQSGKTILDFLKSDGFANRNFMQLIHDDSLTFKEDIQKAQVSGQGDSLHEHIANLAGSPAIKKG
ILQTVKVVDELVKVMGRHKPENIVIEMARENQTTQKGQKNSRERMKRIEEGIKELGSQILKEHPVENT
QLQNEKLYLYYLQNGRDMYVDQELDINRLSDYDVDHIVPQSFLKDDSIDNKVLTRSDKNRGKSDNVPS
EEVVKKMKNYWRQLLNAKLITQRKFDNLTKAERGGLSELDKAGFIKRQLVETRQITKHVAQILDSRMN
TKYDENDKLIREVKVITLKSKLVSDFRKDFQFYKVREINNYHHAHDAYLNAVVGTALIKKYPKLESEFVY
GDYKVYDVRKMIAKSEQEIGKATAKYFFYSSGGSKRTADGSEEEPKKKRKV
ABE8e-VRQR-CP1041 monomer: NLS, linker, TadA* SpCas9-VRQR-CP1041
(SEQ ID NO: 467)
MKRTADGSEFESPKKKRKVSEVEFSHEYWMRHALTLAKRARDEREVPVGAVLVLNNRVIGEGWNRAI
GLHDPTAHAEIMALRQGGLVMQNYRLIDATLYVTFEPCVMCAGAMIHSRIGRVVFGVRNSKRGAAGSL
MNVLNYPGMNHRVEITEGILADECAALLCDFYRMPRQVFNAQKKAQSSINSGGSSGGSSGSETPGTSES
ATPESSGGSSGGSNIMNFFKTEITLANGEIRKRPLIETNGETGEIVWDKGRDFATVRKVLSMPQVNIVKK
TEVQTGGFSKESIRPKRNSDKLIARKKDWDPKKYGGFVSPTVAYSVLVVAKVEKGKSKKLKSVKELLGIT
IMERSSFEKNPIDFLEAKGYKEVKKDLIIKLPKYSLFELENGRKRMLASARFLQKGNELALPSKYVNFLY
LASHYEKLKGSPEDNEQKQLFVEQHKHYLDEIIEQISEFSKRVILADANLDKVLSAYNKHRDKPIREQAE
NIIHLFTLTNLGAPRAFKYFDTTIDRKVYRSTKEVLDATLIHQSITGLYETRIDLSQLGGDGGSGGSGGSG
GSGGSGGSGGDKKYSIGLAIGTNSVGWAVITDEYKVPSKKFKVLGNTDRHSIKKNLIGALLFDSGETAEA
TRLKRTARRRYTRRKNRICYLQEIFSNEMAKVDDSFFHRLEESFLVEEDKKHERHPIFGNIVDEVAYHEK
YPTIYHLRKKLVDSTDKADLRLIYLALAHMIKFRGHFLIEGDLNPDNSDVDKLFIQLVQTYNQLFEENPI
NASGVDAKAILSARLSKSRRLENLIAQLPGEKKNGLFGNLIALSLGLTPNFKSNFDLAEDAKLQLSKDTY
DDDLDNLLAQIGDQYADLFLAAKNLSDAILLSDILRVNTEITKAPLSASMIKRYDEHHQDLTLLKALVRQ
QLPEKYKEIFFDQSKNGYAGYIDGGASQEEFYKFIKPILEKMDGTEELLVKLNREDLLRKQRTFDNGSI
PHQIHLGELHAILRRQEDFYPFLKDNREKIEKILTFRIPYYVGPLARGNSRFAWMTRKSEETITPWNFEE
VVDKGASAQSFIERMTNFDKNLPNEKVLPKHSLLYEYFTVYNELTKVKYVTEGMRKPAFLSGEQKKAIV
DLLFKTNRKVTVKQLKEDYFKKIECFDSVEISGVEDRFNASLGTYHDLLKIIKDKDFLDNEENEDILEDI
VLTLTLFEDREMIEERLKTYAHLFDDKVMKQLKRRRYTGWGRLSRKLINGIRDKQSGKTILDFLKSDGF
ANRNFMQLIHDDSLTFKEDIQKAQVSGQGDSLHEHIANLAGSPAIKKGILQTVKVVDELVKVMGRHKP
ENIVIEMARENQTTQKGQKNSRERMKRIEEGIKELGSQILKEHPVENTQLQNEKLYLYYLQNGRDMYV
DQELDINRLSDYDVDHIVPQSFLKDDSIDNKVLTRSDKNRGKSDNVPSEEVVKKMKNYWRQLLNAKLI
TQRKFDNLTKAERGGLSELDKAGFIKRQLVETRQITKHVAQILDSRMNTKYDENDKLIREVKVITLKSKL
VSDFRKDFQFYKVREINNYHHAHDAYLNAVVGTALIKKYPKLESEFVYGDYKVYDVRKMIAKSEQEIGK
ATAKYFFYSSGGSKRTADGSEFEPKKKRKV
ABE8e-SaCas9 dimer editor: NLS, wtTadA, linker, TadA*, SaCas9
(SEQ ID NO: 452)
MKRTADGSEFESPKKKRKVSEVEFSHEYWMRHALTLAKRAWDEREVPVGAVLVHNNRVIGE
GWNRPIGRHDPTAHAEIMALRQGGLVMQNYRLIDATLYVTLEPCVMCAGAMIHSRIGRVV
FGARDAKTGAAGSLMDVLHHPGMNHRVEITEGILADECAALLSDFFRMRRQEIKAQKKAQ
SSTDSGGSSGGSSGSETPGTSESATPESSGGSSGGSSEVEFSHEYWMRHALTLAKRARDEREVPVG
AVLVLNNRVIGEGWNRAIGLHDPTAHAEIMALRQGGLVMQNYRLIDATLYVTFEPCVMCAGAMIHSRIG
RVVFGVRNSKRGAAGSLMNVLNYPGMNHRVEITEGILADECAALLCDFYRMPRQVFNAQKKAQSSINS
GGSSGGSSGSETPGTSESATPESSGGSSGGSGKRNYILGLAIGITSVGYGIIDYETRDVIDAGVRLFKEA
NVENNEGRRSKRGARRLKRRRRHRIQRVKKLLFDYNLLTDHSELSGINPYEARVKGLSQKLSEEEFSAA
LLHLAKRRGVHNVNEVEEDTGNELSTKEQISRNSKALEEKYVAELQLERLKKDGEVRGSINRFKTSDYV
KEAKQLLKVQKAYHQLDQSFIDTYIDLLETRRTYYEGPGEGSPFGWKDIKEWYEMLMGHCTYFPEELR
SVKYAYNADLYNALNDLNNLVITRDENEKLEYYEKFQIIENVFKQKKKPTLKQIAKEILVNEEDIKGYRVT
STGKPEFTNLKVYHDIKDITARKEIIENAELLDQIAKILTIYQSSEDIQEELTNLNSELTQEEIEQISNLKGY
TGTHNLSLKAINLILDELWHTNDNQIAIFNRLKLVPKKVDLSQQKEIPTTLVDDFILSPVVKRSFIQSIKVI
NAIIKKYGLPNDIIIELAREKNSKDAQKMINEMQKRNRQTNERIEEIIRTTGKENAKYLIEKIKLHDMQE
GKCLYSLEAIPLEDLLNNPFNYEVDHIIPRSVSFDNSFNNKVLVKQEENSKKGNRTPFQYLSSSDSKISYE
TFKKHILNLAKGKGRISKTKKEYLLEERDINRFSVQKDFINRNLVDTRYATRGLMNLLRSYFRVNNLDVK
VKSINGGFTSFLRRKWKFKKERNKGYKHHAEDALIIANADFIFKEWKKLDKAKKVMENQMFEEKQAE
SMPEIETEQEYKEIFITPHQIKHIKDFKDYKYSHRVDKKPNRELINDTLYSTRKDDKGNTLIVNNLNGLY
DKDNDKLKKLINKSPEKLLMYHHDPQTYQKLKLIMEQYGDEKNPLYKYYEETGNYLTKYSKKDNGPVI
KKIKYYGNKLNAHLDITDDYPNSRNKWKLSLKPYRFDVYLDNGVYKFVTVKNLDVIKKENYYEVNSKC
YEEAKKLKKISNQAEFIASFYNNDLIKINGELYRVIGVNNDLLNRIEVNMIDITYREYLENMNDKRPPRIIK
TIASKTQSIKKYSTDILGNLYEVKSKKHPQIIKKGSGGSKRTADGSEFEPKKKRKV
ABE8e-SaCas9 monomer editor: NLS, linker, TadA*, SaCas9
(SEQ ID NO: 468)
MKRTADGSEFESPKKKRKVSEVEFSHEYWMRHALTLAKRARDEREVPVGAVLVLNNRVIGEGWNRAI
GLHDPTAHAEIMALRQGGLVMQNYRLIDATLYVTFEPCVMCAGAMIHSRIGRVVFGVRNSKRGAAGSL
MNVLNYPGMNHRVEITEGILADECAALLCDFYRMPRQVFNAQKKAQSSINSGGSSGGSSGSETPGTSES
ATPESSGGSSGGSGKRNYILGLAIGITSVGYGIIDYETRDVIDAGVRLFKEANVENNEGRRSKRGARRLK
RRRRHRIQRVKKLLFDYNLLTDHSELSGINPYEARVKGLSQKLSEEEFSAALLHLAKRRGVHNVNEVEE
DTGNELSTKEQISRNSKALEEKYVAELQLERLKKDGEVRGSINRFKTSDYVKEAKQLLKVQKAYHQLDQ
SFIDTYIDLLETRRTYYEGPGEGSPFGWKDIKEWYEMLMGHCTYFPEELRSVKYAYNADLYNALNDLNN
LVITRDENEKLEYYEKFQIIENVFKQKKKPTLKQIAKEILVNEEDIKGYRVTSTGKPEFTNLKVYHDIKDI
TARKEIIENAELLDQIAKILTIYQSSEDIQEELTNLNSELTQEEIEQISNLKGYTGTHNLSLKAINLILDELW
HTNDNQIAIFNRLKLVPKKVDLSQQKEIPTTLVDDFILSPVVKRSFIQSIKVINAIIKKYGLPNDIIIELARE
KNSKDAQKMINEMQKRNRQTNERIEEIIRTTGKENAKYLIEKIKLHDMQEGKCLYSLEAIPLEDLLNNP
FNYEVDHIIPRSVSFDNSFNNKVLVKQEENSKKGNRTPFQYLSSSDSKISYETFKKHILNLAKGKGRISKT
KKEYLLEERDINRFSVQKDFINRNLVDTRYATRGLMNLLRSYFRVNNLDVKVKSINGGFTSFLRRKWKF
KKERNKGYKHHAEDALIIANADFIFKEWKKLDKAKKVMENQMFEEKQAESMPEIETEQEYKEIFITPH
QIKHIKDFKDYKYSHRVDKKPNRELINDTLYSTRKDDKGNTLIVNNLNGLYDKDNDKLKKLINKSPEKL
LMYHHDPQTYQKLKLIMEQYGDEKNPLYKYYEETGNYLTKYSKKDNGPVIKKIKYYGNKLNAHLDITD
DYPNSRNKVVKLSLKPYRFDVYLDNGVYKFVTVKNLDVIKKENYYEVNSKCYEEAKKLKKISNQAEFIAS
FYNNDLIKINGELYRVIGVNNDLLNRIEVNMIDITYREYLENMNDKRPPRIIKTIASKTQSIKKYSTDILGN
LYEVKSKKHPQIIKKGSGGSKRTADGSEFEPKKKRKV
ABE8e-NRCH dimer editor: NLS, wtTadA, linker, TadA*, SpCas9-NRCH
(SEQ ID NO: 453)
MKRTADGSEFESPKKKRKVSEVEFSHEYWMRHALTLAKRAWDEREVPVGAVLVHNNRVIGE
GWNRPIGRHDPTAHAEIMALRQGGLVMQNYRLIDATLYVTLEPCVMCAGAMIHSRIGRVV
FGARDAKTGAAGSLMDVLHHPGMNHRVEITEGILADECAALLSDFFRMRRQEIKAQKKAQ
SSTDSGGSSGGSSGSETPGTSESATPESSGGSSGGSSEVEFSHEYWMRHALTLAKRARDEREVPVG
AVLVLNNRVIGEGWNRAIGLHDPTAHAEIMALRQGGLVMQNYRLIDATLYVTFEPCVMCAGAMIHSRIG
RVVFGVRNSKRGAAGSLMNVLNYPGMNHRVEITEGILADECAALLCDFYRMPRQVFNAQKKAQSSINS
GGSSGGSSGSETPGTSESATPESSGGSSGGSDKKYSIGLAIGTNSVGWAVITDEYKVPSKKFKVLGNTD
RHSIKKNLIGALLFDSGETAEATRLKRTARRRYTRRKNRICYLQEIFSNEMAKVDDSFFHRLEESFLVEED
KKHERHPIFGNIVDEVAYHEKYPTIYHLRKKLVDSTDKADLRLIYLALAHMIKFRGHFLIEGDLNPDNSD
VDKLFIQLVQTYNQLFEENPINASGVDAKAILSARLSKSRRLENLIAQLPGEKKNGLFGNLIALSLGLTPN
FKSNFDLAEDAKLQLSKDTYDDDLDNLLAQIGDQYADLFLAAKNLSDAILLSDILRVNTEITKAPLSASM
VKRYDEHHQDLTLLKALVRQQLPEKYKEIFFDQSKNGYAGYIDGGASQEEFYKFIKPILEKMDGTEELL
VKLNREDLLRKQRTFDNGIIPHQIHLGELHAILRRQGDFYPFLKDNREKIEKILTFRIPYYVGPLARGNS
RFAWMTRKSEETITPWNFEEVVDKGASAQSFIERMTNFDKNLPNEKVLPKHSLLYEYFTVYNELTKVKY
VTEGMRKPAFLSGEQKKAIVDLLFKTNRKVTVKQLKEDYFKKIECFDSVEISGVEDRFNASLGTYHDLL
KIIKDKDFLDNEENEDILEDIVLTLTLFEDREMIEERLKTYAHLFDDKVMKQLKRLRYTGWGRLSRKLIN
GIRDKQSGKTILDFLKSDGFANRNFMQLIHDDSLTFKEDIQKAQVSCQGDSLHEHIANLAGSPAIKKGI
LQTVKVVDELIKVMGGHKPENIVIEMARENQTTQKGQKNSRERMKRIEEGIKELGSQILKEHPVENTQ
LQNEKLYLYYLQNGRDMYVDQELDINRLSDYDVDHIVPQSFLKDDSIENKVLTRSDKNRGKSDNVPSE
EWKKMKNYWRQLLNAKLITQRKFDNLTKAERGGLSELDKAGFIKRQLAETRQITKHVAQILDSRMNT
KYDENDKLIREVKVITLKSKLVSDFRKDFQFYKVREINNYHHAHDAYLNAVVGTALIKKYPKLESEFVYG
DYKVYDVRKMIAKSEQEIGKATAKYFFYSNIMNFFKTEITLANGEIRKRPLIETNGETGEIVWDKGRDFA
TVRKVLSMPQVNIVKKTEVQTGGFSKESILPKGNSDKLIARKKDWDPKKYGGFNSPTVAYSVLVVAKVE
KGKSKKLKSVKELLGITIMERSSFEKNPIDFLEAKGYKEVKKDLIIKLPKYSLFELENGRKRMLASAGVL
QKGNELALPSKYVNFLYLASHYEKLKGSPEDNEQKQLFVEQHKHYLDEIIEQISEFSKRVILADANLDK
VLSAYNKHRDKPIREQAENIIHLFTLTNLGAPAAFKYFDTTINRKQYNTTKEVLDATLIRQSITGLYETRID
LSQLGGDSGGSKRTADGSEFEPKKKRKV
ABE8e-NRCH monomer editor: NLS, linker, TadA*, SpCas9-NRCH
(SEQ ID NO: 469)
MKRTADGSEFESPKKKRKVSEVEFSHEYWMRHALTLAKRARDEREVPVGAVLVLNNRVIGEGWNRAI
GLHDPTAHAEIMALRQGGLVMQNYRLIDATLYVTFEPCVMCAGAMIHSRIGRVVFGVRNSKRGAAGSL
MNVLNYPGMNHRVEITEGILADECAALLCDFYRMPRQVFNAQKKAQSSINSGGSSGGSSGSETPGTSES
ATPESSGGSSGGSDKKYSIGLAIGTNSVGWAVITDEYKVPSKKFKVLGNTDRHSIKKNLIGALLFDSGET
AEATRLKRTARRRYTRRKNRICYLQEIFSNEMAKVDDSFFHRLEESFLVEEDKKHERHPIFGNIVDEVAY
HEKYPTIYHLRKKLVDSTDKADLRLIYLALAHMIKFRGHFLIEGDLNPDNSDVDKLFIQLVQTYNQLFE
ENPINASGVDAKAILSARLSKSRRLENLIAQLPGEKKNGLFGNLIALSLGLTPNFKSNFDLAEDAKLQLS
KDTYDDDLDNLLAQIGDQYADLFLAAKNLSDAILLSDILRVNTEITKAPLSASMVKRYDEHHQDLTLLK
ALVRQQLPEKYKEIFFDQSKNGYAGYIDGGASQEEFYKFIKPILEKMDGTEELLVKLNREDLLRKQRTF
DNGIIPHQIHLGELHAILRRQGDFYPFLKDNREKIEKILTFRIPYYVGPLARGNSRFAWMTRKSEETITPW
NFEEVVDKGASAQSFIERMTNFDKNLPNEKVLPKHSLLYEYFTVYNELTKVKYVFEGMRKPAFLSGEQ
KKAIVDLLFKTNRKVTVKQLKEDYFKKIECFDSVEISGVEDRFNASLGTYHDLLKHKDKDFLDNEENE
DILEDIVLTLTLFEDREMIEERLKTYAHLFDDKVMKQLKRLRYTGWGRLSRKLINGIRDKQSGKTILDFL
KSDGFANRNFMQLIHDDSLTFKEDIQKAQVSCQGDSLHEHIANLAGSPAIKKGILQTVKWDELIKVMG
GHKPENIVIEMARENQTTQKGQKNSRERMKRIEEGIKELGSQILKEHPVENTQLQNEKLYLYYLQNGR
DMYVDQELDINRLSDYDVDHIVPQSFLKDDSIENKVLTRSDKNRGKSDNVPSEEVVKKMKNYWRQLLN
AKLITQRKFDNLTKAERGGLSELDKAGFIKRQLAETRQITKHVAQILDSRMNTKYDENDKLIREVKVITL
KSKLVSDFRKDFQFYKVREINNYHHAHDAYLNAVVGTALIKKYPKLESEFVYGDYKVYDVRKMIAKSEQ
EIGKATAKYFFYSNIMNFFKTEITLANGEIRKRPLIETNGETGEIVWDKGRDFATVRKVLSMPQVNIVKK
TEVQTGGFSKESILPKGNSDKLIARKKDWDPKKYGGFNSPTVAYSVLVVAKVEKGKSKKLKSVKELLGI
TIMERSSFEKNPIDFLEAKGYKEVKKDLIIKLPKYSLFELENGRKRMLASAGVLQKGNELALPSKYVNFL
YLASHYEKLKGSPEDNEQKQLFVEQHKHYLDEIIEQISEFSKRVILADANLDKVLSAYNKHRDKPIREQA
ENIIHLFTLTNLGAPAAFKYFDTTINRKQYNTTKEVLDATLIRQSITGLYETRIDLSQLGGDSGGSKRTAD
GSEFEPKKKRKV
ABE8e-NRRH dimer editor: NLS, wtTadA, linker, TadA*, SpCas9-NRRH
(SEQ ID NO: 454)
MKRTADGSEFESPKKKRKVSEVEFSHEYWMRHALTLAKRAWDEREVPVGAVLVHNNRVIGEGWNRPI
GRHDPTAHAEIMALRQGGLVMQNYRLIDATLYVTLEPCVMCAGAMIHSRIGRVVFGARDAKTGAAG
SLMDVLHHPGMNHRVEITEGILADECAALLSDFFRMRRQEIKAQKKAQSSTDSGGSSGGSSGSETPGT
SESATPESSGGSSGGSSEVEFSHEYWMRHALTLAKRARDEREVPVGAVLVLNNRVIGEGWNRAIGLHDPTAHAEI
MALRQGGLVMQNYRLIDATLYVTFEPCVMCAGAMIHSRIGRVVFGVRNSKRGAAGSLMNVLNYPGMNHRVEITE
GILADECAALLCDFYRMPRQVFNAQKKAQSSINSGGSSGGSSGSEYPGYSESAFPESSGGSSGGSDKKYSIGLAIG
TNSVGWAVITDEYKVPSKKFKVLGNTDRHSIKKNLIGALLFDSGETAEATRLKRTARRRYTRRKNRICYLQEIFSNEM
AKVDDSFFHRLEESFLVEEDKKHERHPIFGNIVDEVAYHEKYPTIYHLRKKLVDSTDKADLRLIYLALAHMIKFRG
HFLIEGDLNPDNSDVDKLFIQLVQTYNQLFEENPINASGVDAKAILSARLSKSRRLENLIAQLPGEKKNGLFGNLIA
LSLGLTPNFKSNFDLAEDAKLQLSKDTYDDDLDNLLAQIGDQYADLFLAAKNLSDAILLSDILRVNTEITKAPLSAS
MVKRYDEHHQDLTLLKALVRQQLPEKYKEIFFDQSKNGYAGYIDGGASQEEFYKFIKPILEKMDGTEELLVKLNR
EDLLRKQRTFDNGIIPHQIHLGELHAILRRQGDFYPFLKDNREKIEKILTFRIPYYVGPLARGNSRFAWMTRKSEETI
TPWNFEEVVDKGASAQSFIERMTNFDKNLPNEKVLPKHSLLYEYFTVYNELTKVKYVTEGMRKPAFLSGEQKKAIV
DLLFKTNRKVTVKQLKEDYFKKIECFDSVEISGVEDRFNASLGTYHDLLKIIKDKDFLDNEENEDILEDIVLTLTLF
EDREMIEERLKTYAHLFDDKVMKQLKRLRYTGWGRLSRKLINGIRDKQSGKTILDFLKSDGFANRNFMQLIHDDS
LTFKEDIQKAQVSCQGDSLHEHIANLAGSPAIKKGILQTVKWDELIKVMGGHKPENIVIEMARENQTTQKGQKNS
RERMKRIEEGIKELGSQILKEHPVENTQLQNEKLYLYYLQNGRDMYVDQELDINRLSDYDVDHIVPQSFLKDDSIE
NKVLTRSDKNRGKSDNVPSEEVVKKMKNYWRQLLNAKLITQRKFDNLTKAERGGLSELDKAGFIKRQLAETRQIT
KHVAQILDSRMNTKYDENDKLIREVKVITLKSKLVSDFRKDFQFYKVREINNYHHAHDAYLNAVVGTALIKKYPKLE
SEFVYGDYKVYDVRKMIAKSEQEIGKATAKYFFYSNIMNFFKTEITLANGEIRKRPLIETNGETGEIVWDKGRDFAT
VRKVLSMPQVNIVKKTEVQTGGFSKESILPKGNSDKLIARKKDWDPKKYGGFNSPTAAYSVLVVAKVEKGKSKKLK
SVKELLGITIMERSSFEKNPIGFLEAKGYKEVKKDLIIKLPKYSLFELENGRKRMLASAGVLHKGNELALPSKYVNF
LYLASHYEKLKGSPEDNEQKQLFVEQHKHYLDEIIEQISEFSKRVILADANLDKVLSAYNKHRDKPIREQAENIIHLF
TLTNLGVPAAFKYFDTTIDKKRYTSTKEVLDATLIHQSITGLYETRIDLSQLGGDSGGSKRTADGSEFEPKKKRKV
ABE8e-NRRH monomer editor NLS, linker, TadA*, SpCas9-NRRF1
(SEQ ID NO: 470)
MKRPADGSEEESPKKKRKVSEVEFSHEYWMRHALTLAKRARDEREVPVGAVLVLNNRVIGEGWNRAI
GLHDPTAHAEIMALRQGGLVMQNYRLIDATLYVTFEPCVMCAGAMIHSRIGRWFGVRNSKRGAAGSL
MNVLNYPGMNHRVEITEGILADECAALLCDFYRMPRQVFNAQKKAQSSINSGGSSGGSSGSETPGTSE
SAPPESSGGSSGGSDKKYSIGLAIGTNSVGWAVITDEYKVPSKKFKVLGNTDRHSIKKNLIGALLFDSGE
TAEATRLKRTARRRYTRRKNRICYLQEIFSNEMAKVDDSFFHRLEESFLVEEDKKHERHPIFGNIVDEVA
YHEKYPTIYHLRKKLVDSTDKADLRLIYLALAHMIKFRGHFLIEGDLNPDNSDVDKLFIQLVQTYNQLFE
ENPINASGVDAKAILSARLSKSRRLENLIAQLPGEKKNGLFGNLIALSLGLTPNFKSNFDLAEDAKLQLS
KDTYDDDLDNLLAQIGDQYADLFLAAKNLSDAILLSDILRVNTEITKAPLSASMVKRYDEHHQDLTLLK
ALVRQQLPEKYKEIFFDQSKNGYAGYIDGGASQEEFYKFIKPILEKMDGTEELLVKLNREDLLRKQRTF
DNGIIPHQIHLGELHAILRRQGDFYPFLKDNREKIEKILTFRIPYYVGPLARGNSRFAWMTRKSEETITPW
NFEEVVDKGASAQSFIERMTNFDKNLPNEKVLPKHSLLYEYFTVYNELTKVKYVFEGMRKPAFLSGEQ
KKAIVDLLFKTNRKVTVKQLKEDYFKKIECFDSVEISGVEDRFNASLGTYHDLLKIIKDKDFLDNEENE
DILEDIVLTLTLFEDREMIEERLKTYAHLFDDKVMKQLKRLRYTGWGRLSRKLINGIRDKQSGKTILDFL
KSDGFANRNFMQLIHDDSLTFKEDIQKAQVSCQGDSLHEHIANLAGSPAIKKGILQTVKVVDELIKVMG
GHKPENIVIEMARENQTTQKGQKNSRERMKRIEEGIKELGSQILKEHPVENTQLQNEKLYLYYLQNGR
DMYVDQELDINRLSDYDVDHIVPQSFLKDDSIENKVLTRSDKNRGKSDNVPSEEVVKKMKNYWRQLLN
AKLITQRKFDNLTKAERGGLSELDKAGFIKRQLAETRQITKHVAQILDSRMNTKYDENDKLIREVKVITL
KSKLVSDFRKDFQFYKVREINNYHHAHDAYLNAVVGTALIKKYPKLESEFVYGDYKVYDVRKMIAKSEQ
EIGKATAKYFFYSNIMNFFKTEITLANGEIRKRPLIETNGETGEIVWDKGRDFATVRKVLSMPQVNIVKK
TEVQTGGFSKESILPKGNSDKLIARKKDWDPKKYGGFNSPTAAYSVLWAKVEKGKSKKLKSVKELLGI
TIMERSSFEKNPIGFLEAKGYKEVKKDLIIKLPKYSLFELENGRKRMLASAGVLHKGNELALPSKYVNFL
YLASHYEKLKGSPEDNEQKQLFVEQHKHYLDEIIEQISEFSKRVILADANLDKVLSAYNKHRDKPIREQA
ENIIHLFTLTNLGVPAAFKYFDTTIDKKRYTSTKEVLDATLIHQSITGLYETRIDLSQLGGDSGGSKRTAD
GSEFEPKKKRKV
SaKKH-ABE8e dimer editor: NLS, wtTadA, linker, TadA*, SaKKH
(SEQ ID NO: 455)
MKRTADGSEFESPKKKRKVSEVEFSHEYWMRHALTLAKRAWDEREVPVGAVLVHNNRVIGE
GWNRPIGRHDPTAHAEIMALRQGGLVMQNYRLIDATLYVTLEPCVMCAGAMIHSRIGRVV
FGARDAKTGAAGSLMDVLHHPGMNHRVEITEGILADECAALLSDFFRMRRQEIKAQKKAQ
SSTDSGGSSGGSSGSEYPGYSESAYPESSGGSSGGSSEVEFSHEYWMRHALTLAKRARDEREVPVGAV
LVLNNRVIGEGWNRAIGLHDPTAHAEIMALRQGGLVMQNYRLIDATLYVTFEPCVMCAGAMIHSRIGRV
VFGVRNSKRGAAGSLMNVLNYPGMNHRVEITEGILADECAALLCDFYRMPRQVFNAQKKAQSSINSGG
SSGGSSGSETPGTSESATPESSGGSSGGSGKRNYILGLAIGITSVGYGIIDYETRDVIDAGVRLFKEANVE
NNEGRRSKRGARRLKRRRRHRIQRVKKLLFDYNLLTDHSELSGINPYEARVKGLSQKLSEEEFSAALLHL
AKRRGVHNVNEVEEDTGNELSTKEQISRNSKALEEKYVAELQLERLKKDGEVRGSINRFKTSDYVKEAK
QLLKVQKAYHQLDQSFIDTYIDLLETRRTYYEGPGEGSPFGWKDIKEWYEMLMGHCTYFPEELRSVKY
AYNADLYNALNDLNNLVITRDENEKLEYYEKFQIIENVFKQKKKPTLKQIAKEILVNEEDIKGYRVFSTG
KPEFTNLKVYHDIKDITARKEIIENAELLDQIAKILTIYQSSEDIQEELTNLNSELTQEEIEQISNLKGYTGT
HNLSLKAINLILDELWHTNDNQIAIFNRLKLVPKKVDLSQQKEIPTTLVDDFILSPVVKRSFIQSIKVINAII
KKYGLPNDIIIELAREKNSKDAQKMINEMQKRNRQTNERIEEIIRTTGKENAKYLIEKIKLHDMQEGKCL
YSLEAIPLEDLLNNPFNYEVDHIIPRSVSFDNSFNNKVLVKQEENSKKGNRTPFQYLSSSDSKISYETFKK
HILNLAKGKGRISKTKKEYLLEERDINRFSVQKDFINRNLVDTRYATRGLMNLLRSYFRVNNLDVKVKSI
NGGFTSFLRRKWKFKKERNKGYKHHAEDALIIANADFIFKEWKKLDKAKKVMENQMFEEKQAESMP
EIETEQEYKEIFITPHQIKHIKDFKDYKYSHRVDKKPNRKLINDTLYSTRKDDKGNTLIVNNLNGLYDKD
NDKLKKLINKSPEKLLMYHHDPQTYQKLKLIMEQYGDEKNPLYKYYEETGNYLTKYSKKDNGPVIKKI
KYYGNKLNAHLDITDDYPNSRNKWKLSLKPYRFDVYLDNGVYKFVTVKNLDVIKKENYYEVNSKCYEE
AKKLKKISNQAEFIASFYKNDLIKINGEEYRVIGVNNDLLNRIEVNMIDITYREYLENMNDKRPPHIIKTIA
SKTQSIKKYSTDILGNLYEVKSKKHPQIIKKGSGGSKRTADGSEFEPKKKRKV
SaKKH-ABE8e monomer editor: NLS, linker, TadA*, SaKKH
(SEQ ID NO: 471)
MKRTADGSEFESPKKKRKVSEVEFSHEYWMRHALTLAKRARDEREVPVGAVLVLNNRVIGEGWNRAI
GLHDPTAHAEIMALRQGGLVMQNYRLIDATLYVTFEPCVMCAGAMIHSRIGRVVFGVRNSKRGAAGSL
MNVLNYPGMNHRVEITEGILADECAALLCDFYRMPRQVFNAQKKAQSSINSGGSSGGSSGSETPGTSE
SKPPESSGGSSGGSGKRNYILGLAIGITSVGYGIIDYETRDVIDAGVRLFKEANVENNEGRRSKRGARRL
KRRRRHRIQRVKKLLFDYNLLTDHSELSGINPYEARVKGLSQKLSEEEFSAALLHLAKRRGVHNVNEVE
EDTGNELSTKEQISRNSKALEEKYVAELQLERLKKDGEVRGSINRFKTSDYVKEAKQLLKVQKAYHQLD
QSFIDTYIDLLETRRTYYEGPGEGSPFGWKDIKEWYEMLMGHCTYFPEELRSVKYAYNADLYNALNDLN
NLVITRDENEKLEYYEKFQIIENVFKQKKKPTLKQIAKEILVNEEDIKGYRVFSTGKPEFTNLKVYHDIKD
ITARKEIIENAELLDQIAKILTIYQSSEDIQEELTNLNSELTQEEIEQISNLKGYTGTHNLSLKAINLILDELW
HTNDNQIAIFNRLKLVPKKVDLSQQKEIPTTLVDDFILSPVVKRSFIQSIKVINAIIKKYGLPNDIIIELARE
KNSKDAQKMINEMQKRNRQTNERIEEIIRTTGKENAKYLIEKIKLHDMQEGKCLYSLEAIPLEDLLNNP
FNYEVDHIIPRSVSFDNSFNNKVLVKQEENSKKGNRTPFQYLSSSDSKISYETFKKHILNLAKGKGRISKT
KKEYLLEERDINRFSVQKDFINRNLVDTRYATRGLMNLLRSYFRVNNLDVKVKSINGGFTSFLRRKWKF
KKERNKGYKHHAEDALIIANADFIFKEWKKLDKAKKVMENQMFEEKQAESMPEIETEQEYKEIFITPH
QIKHIKDFKDYKYSHRVDKKPNRKLINDTLYSTRKDDKGNTLIVNNLNGLYDKDNDKLKKLINKSPEKL
LMYHHDPQTYQKLKLIMEQYGDEKNPLYKYYEETGNYLTKYSKKDNGPVIKKIKYYGNKLNAHLDITD
DYPNSRNKVVKLSLKPYRFDVYLDNGVYKFVTVKNLDVIKKENYYEVNSKCYEEAKKLKKISNQAEFIAS
FYKNDLIKINGELYRVIGVNNDLLNRIEVNMIDITYREYLENMNDKRPPHIIKTIASKTQSIKKYSTDILGN
LYEVKSKKHPQIIKKGSGGSKRTADGSEFEPKKKRKV
ABE8e-NG dimer editor: NLS, wtTadA, linker, TadA*, SpCas9-NG
(SEQ ID NO: 456)
MKRTADGSEFESPKKKRKVSEVEFSHEYWMRHALTLAKRAWDEREVPVGAVLVHNNRVIGE
GWNRPIGRHDPTAHAEIMALRQGGLVMQNYRLIDATLYVTLEPCVMCAGAMIHSRIGRVV
FGARDAKTGAAGSLMDVLHHPGMNHRVEITEGILADECAALLSDFFRMRRQEIKAQKKAQ
SSTDSGGSSGGSSGSEYPGYSESAYPESSGGSSGGSSEVEFSHEYWMRHALTLAKRARDEREVPVGAV
LVLNNRVIGEGWNRAIGLHDPTAHAEIMALRQGGLVMQNYRLIDATLYVTFEPCVMCAGAMIHSRIGRV
VFGVRNSKRGAAGSLMNVLNYPGMNHRVEITEGILADECAALLCDFYRMPRQVFNAQKKAQSSINSGG
SSGGSSGSETPGTSESATPESSGGSSGGSDKKYSIGLAIGTNSVGWAVITDEYKVPSKKFKVLGNTDRH
SIKKNLIGALLFDSGETAEATRLKRTARRRYTRRKNRICYLQEIFSNEMAKVDDSFFHRLEESFLVEEDKK
HERHPIFGNIVDEVAYHEKYPTIYHLRKKLVDSTDKADLRLIYLALAHMIKFRGHFLIEGDLNPDNSDVD
KLFIQLVQTYNQLFEENPINASGVDAKAILSARLSKSRRLENLIAQLPGEKKNGLFGNLIALSLGLTPNFK
SNFDLAEDAKLQLSKDTYDDDLDNLLAQIGDQYADLFLAAKNLSDAILLSDILRVNTEITKAPLSASMIK
RYDEHHQDLTLLKALVRQQLPEKYKEIFFDQSKNGYAGYIDGGASQEEFYKFIKPILEKMDGTEELLVK
LNREDLLRKQRTFDNGSIPHQIHLGELHAILRRQEDFYPFLKDNREKIEKILTFRIPYYVGPLARGNSRF
AWMTRKSEETITPWNFEEVVDKGASAQSFIERMTNFDKNLPNEKVLPKHSLLYEYFTVYNELTKVKYVT
EGMRKPAFLSGEQKKAIVDLLFKTNRKVTVKQLKEDYFKKIECFDSVEISGVEDRFNASLGTYHDLLKII
KDKDFLDNEENEDILEDIVLTLTLFEDREMIEERLKTYAHLFDDKVMKQLKRRRYTGWGRLSRKLINGI
RDKQSGKTILDFLKSDGFANRNFMQLIHDDSLTFKEDIQKAQVSGQGDSLHEHIANLAGSPAIKKGILQ
TVKVVDELVKVMGRHKPENIVIEMARENQTTQKGQKNSRERMKRIEEGIKELGSQILKEHPVENTQLQ
NEKLYLYYLQNGRDMYVDQELDINRLSDYDVDHIVPQSFLKDDSIDNKVLTRSDKNRGKSDNVPSEEV
VKKMKNYWRQLLNAKLITQRKFDNLTKAERGGLSELDKAGFIKRQLVETRQITKHVAQILDSRMNTKY
DENDKLIREVKVITLKSKLVSDFRKDFQFYKVREINNYHHAHDAYLNAWGTALIKKYPKLESEFVYGDY
KVYDVRKMIAKSEQEIGKATAKYFFYSNIMNFFKTEITLANGEIRKRPLIETNGETGEIVWDKGRDFATV
RKVLSMPQVNIVKKTEVQTGGFSKESIRPKRNSDKLIARKKDWDPKKYGGFVSPTVAYSVLVVAKVEKG
KSKKLKSVKELLGITIMERSSFEKNPIDFLEAKGYKEVKKDLIIKLPKYSLFELENGRKRMLASARFLQK
GNELALPSKYVNFLYLASHYEKLKGSPEDNEQKQLFVEQHKHYLDEIIEQISEFSKRVILADANLDKVLS
AYNKHRDKPIREQAENIIHLFTLTNLGAPRAFKYFDTTIDRKVYRSTKEVLDATLIHQSITGLYETRIDLSQ
LGGDSGGSKRTADGSEFEPKKKRKV
ABE8e-NG monomer editor: NLS, linker, TadA*, SpCas9-NG (“NG-ABE8e”)
(SEQ ID NO: 472)
MKRTADGSEFESPKKKRKVSEVEFSHEYWMRHALTLAKRARDEREVPVGAVLVLNNRVIGEGWNRAI
GLHDPTAHAEIMALRQGGLVMQNYRLIDATLYVTFEPCVMCAGAMIHSRIGRVVFGVRNSKRGAAGSL
MNVLNYPGMNHRVEITEGILADECAALLCDFYRMPRQVFNAQKKAQSSINSGGSSGGSSGSETPGTSE
SATPESSGGSSGGSDKKYSIGLAIGTNSVGWAVITDEYKVPSKKFKVLGNTDRHSIKKNLIGALLFDSGE
TAEATRLKRTARRRYTRRKNRICYLQEIFSNEMAKVDDSFFHRLEESFLVEEDKKHERHPIFGNIVDEVA
YHEKYPTIYHLRKKLVDSTDKADLRLIYLALAHMIKFRGHFLIEGDLNPDNSDVDKLFIQLVQTYNQLFE
ENPINASGVDAKAILSARLSKSRRLENLIAQLPGEKKNGLFGNLIALSLGLTPNFKSNFDLAEDAKLQLS
KDTYDDDLDNLLAQIGDQYADLFLAAKNLSDAILLSDILRVNTEITKAPLSASMIKRYDEHHQDLTLLKA
LVRQQLPEKYKEIFFDQSKNGYAGYIDGGASQEEFYKFIKPILEKMDGTEELLVKLNREDLLRKQRTFD
NGSIPHQIHLGELHAILRRQEDFYPFLKDNREKIEKILTFRIPYYVGPLARGNSRFAWMTRKSEETITPWN
FEEVVDKGASAQSFIERMTNFDKNLPNEKVLPKHSLLYEYFTVYNELTKVKYVTEGMRKPAFLSGEQK
KAIVDLLFKTNRKVTVKQLKEDYFKKIECFDSVEISGVEDRFNASLGTYHDLLKIIKDKDFLDNEENEDI
LEDIVLTLTLFEDREMIEERLKTYAHLFDDKVMKQLKRRRYTGWGRLSRKLINGIRDKQSGKTILDFLKS
DGFANRNFMQLIHDDSLTFKEDIQKAQVSGQGDSLHEHIANLAGSPAIKKGILQTVKVVDELVKVMGR
HKPENIVIEMARENQTTQKGQKNSRERMKRIEEGIKELGSQILKEHPVENTQLQNEKLYLYYLQNGRD
MYVDQELDINRLSDYDVDHIVPQSFLKDDSIDNKVLTRSDKNRGKSDNVPSEEWKKMKNYWRQLLNA
KLITQRKFDNLTKAERGGLSELDKAGFIKRQLVETRQITKHVAQILDSRMNTKYDENDKLIREVKVITLK
SKLVSDFRKDFQFYKVREINNYHHAHDAYLNAVVGTALIKKYPKLESEFVYGDYKVYDVRKMIAKSEQE
IGKATAKYFFYSNIMNFFKTEITLANGEIRKRPLIETNGETGEIVWDKGRDFATVRKVLSMPQVNIVKKT
EVQTGGFSKESIRPKRNSDKLIARKKDWDPKKYGGFVSPTVAYSVLWAKVEKGKSKKLKSVKELLGITI
MERSSFEKNPIDFLEAKGYKEVKKDLIIKLPKYSLFELENGRKRMLASARFLQKGNELALPSKYVNFLYL
ASHYEKLKGSPEDNEQKQLFVEQHKHYLDEIIEQISEFSKRVILADANLDKVLSAYNKHRDKPIREQAE
NIIHLFTLTNLGAPRAFKYFDTTIDRKVYRSTKEVLDATLIHQSITGLYETRIDLSQLGGDSGGSKRTADG
SEFEPKKKRKV
ABE8e-CP1041 dimer editor: NLS, wtTadA, linker, TadA*, CP1041
(SEQ ID NO: 457)
MKRTADGSEFESPKKKRKVSEVEFSHEYWMRHALTLAKRAWDEREVPVGAVLVHNNRVIGE
GWNRPIGRHDPTAHAEIMALRQGGLVMQNYRLIDATLYVTLEPCVMCAGAMIHSRIGRVV
FGARDAKTGAAGSLMDVLHHPGMNHRVEITEGILADECAALLSDFFRMRRQEIKAQKKAQ
SSTDSGGSSGGSSGSEYPGYSESAYPESSGGSSGGSSEVEFSHEYWMRHALTLAKRARDEREVPVGAV
LVLNNRVIGEGWNRAIGLHDPTAHAEIMALRQGGLVMQNYRLIDATLYVTFEPCVMCAGAMIHSRIGRV
VFGVRNSKRGAAGSLMNVLNYPGMNHRVEITEGILADECAALLCDFYRMPRQVFNAQKKAQSSINSGG
SSGGSSGSETPGTSESATPESSGGSSGGSNIMNFFKTEITLANGEIRKRPLIETNGETGEIVWDKGRDFA
TVRKVLSMPQVNIVKKTEVQTGGFSKESILPKRNSDKLIARKKDWDPKKYGGFDSPTVAYSVLVVAKVE
KGKSKKLKSVKELLGITIMERSSFEKNPIDFLEAKGYKEVKKDLIIKLPKYSLFELENGRKRMLASAGEL
QKGNELALPSKYVNFLYLASHYEKLKGSPEDNEQKQLFVEQHKHYLDEIIEQISEFSKRVILADANLDK
VLSAYNKHRDKPIREQAENIIHLFTLTNLGAPAAFKYFDTTIDRKRYTSTKEVLDATLIHQSITGLYETRID
LSQLGGDGGSGGSGGSGGSGGSGGSGGDKKYSIGLAIGTNSVGWAVITDEYKVPSKKFKVLGNTDRHS
IKKNLIGALLFDSGETAEATRLKRTARRRYTRRKNRICYLQEIFSNEMAKVDDSFFHRLEESFLVEEDKK
HERHPIFGNIVDEVAYHEKYPTIYHLRKKLVDSTDKADLRLIYLALAHMIKFRGHFLIEGDLNPDNSDVD
KLFIQLVQTYNQLFEENPINASGVDAKAILSARLSKSRRLENLIAQLPGEKKNGLFGNLIALSLGLTPNFK
SNFDLAEDAKLQLSKDTYDDDLDNLLAQIGDQYADLFLAAKNLSDAILLSDILRVNTEITKAPLSASMIK
RYDEHHQDLTLLKALVRQQLPEKYKEIFFDQSKNGYAGYIDGGASQEEFYKFIKPILEKMDGTEELLVK
LNREDLLRKQRTFDNGSIPHQIHLGELHAILRRQEDFYPFLKDNREKIEKILTFRIPYYVGPLARGNSRF
AWMTRKSEETITPWNFEEVVDKGASAQSFIERMTNFDKNLPNEKVLPKHSLLYEYFTVYNELTKVKYVT
EGMRKPAFLSGEQKKAIVDLLFKTNRKVTVKQLKEDYFKKIECFDSVEISGVEDRFNASLGTYHDLLKn
KDKDFLDNEENEDILEDIVLTLTLFEDREMIEERLKTYAHLFDDKVMKQLKRRRYTGWGRLSRKLINGI
RDKQSGKTILDFLKSDGFANRNFMQLIHDDSLTFKEDIQKAQVSGQGDSLHEHIANLAGSPAIKKGILQ
TVKVVDELVKVMGRHKPENIVIEMARENQTTQKGQKNSRERMKRIEEGIKELGSQILKEHPVENTQLQ
NEKLYLYYLQNGRDMYVDQELDINRLSDYDVDHIVPQSFLKDDSIDNKVLTRSDKNRGKSDNVPSEEV
VKKMKNYWRQLLNAKLITQRKFDNLTKAERGGLSELDKAGFIKRQLVETRQITKHVAQILDSRMNTKY
DENDKLIREVKVITLKSKLVSDFRKDFQFYKVREINNYHHAHDAYLNAWGTALIKKYPKLESEFVYGDY
KVYDVRKMIAKSEQEIGKATAKYFFYSSGGSKRTADGSEFEPKKKRKV
ABE8e-CP1041 monomer editor: NLS, linker, TadA*, CP1041
(SEQ ID NO: 473)
MKRTADGSEFESPKKKRKVSEVEFSHEYWMRHALTLAKRARDEREVPVGAVLVLNNRVIGEGWNRAI
GLHDPTAHAEIMALRQGGLVMQNYRLIDATLYVTFEPCVMCAGAMIHSRIGRVVFGVRNSKRGAAGSL
MNVLNYPGMNHRVEITEGILADECAALLCDFYRMPRQVFNAQKKAQSSINSGGSSGGSSGSETPGTSE
SATPESSGGSSGGSNIMNFFKTEITLANGEIRKRPLIETNGETGEIVWDKGRDFATVRKVLSMPQVNIVK
KTEVQTGGFSKESILPKRNSDKLIARKKDWDPKKYGGFDSPTVAYSVLVVAKVEKGKSKKLKSVKELLG
ITIMERSSFEKNPIDFLEAKGYKEVKKDLIIKLPKYSLFELENGRKRMLASAGELQKGNELALPSKYVNF
LYLASHYEKLKGSPEDNEQKQLFVEQHKHYLDEIIEQISEFSKRVILADANLDKVLSAYNKHRDKPIREQ
AENIIHLFTLTNLGAPAAFKYFDTTIDRKRYTSTKEVLDATLIHQSITGLYETRIDLSQLGGDGGSGGSGG
SGGSGGSGGSGGDKKYSIGLAIGTNSVGWAVITDEYKVPSKKFKVLGNTDRHSIKKNLIGALLFDSGETA
EATRLKRTARRRYTRRKNRICYLQEIFSNEMAKVDDSFFHRLEESFLVEEDKKHERHPIFGNIVDEVAYH
EKYPTIYHLRKKLVDSTDKADLRLIYLALAHMIKFRGHFLIEGDLNPDNSDVDKLFIQLVQTYNQLFEEN
PINASGVDAKAILSARLSKSRRLENLIAQLPGEKKNGLFGNLIALSLGLTPNFKSNFDLAEDAKLQLSKD
TYDDDLDNLLAQIGDQYADLFLAAKNLSDAILLSDILRVNTEITKAPLSASMIKRYDEHHQDLTLLKALV
RQQLPEKYKEIFFDQSKNGYAGYIDGGASQEEFYKFIKPILEKMDGTEELLVKLNREDLLRKQRTFDN
GSIPHQIHLGELHAILRRQEDFYPFLKDNREKIEKILTFRIPYYVGPLARGNSRFAWMTRKSEETITPWNF
EEVVDKGASAQSFIERMTNFDKNLPNEKVLPKHSLLYEYFTVYNELTKVKYVTEGMRKPAFLSGEQKK
AIVDLLFKTNRKVTVKQLKEDYFKKIECFDSVEISGVEDRFNASLGTYHDLLKIIKDKDFLDNEENEDIL
EDIVLTLTLFEDREMIEERLKTYAHLFDDKVMKQLKRRRYTGWGRLSRKLINGIRDKQSGKTILDFLKS
DGFANRNFMQLIHDDSLTFKEDIQKAQVSGQGDSLHEHIANLAGSPAIKKGILQTVKVVDELVKVMGR
HKPENIVIEMARENQTTQKGQKNSRERMKRIEEGIKELGSQILKEHPVENTQLQNEKLYLYYLQNGRD
MYVDQELDINRLSDYDVDHIVPQSFLKDDSIDNKVLTRSDKNRGKSDNVPSEEWKKMKNYWRQLLNA
KLITQRKFDNLTKAERGGLSELDKAGFIKRQLVETRQITKHVAQILDSRMNTKYDENDKLIREVKVITLK
SKLVSDFRKDFQFYKVREINNYHHAHDAYLNAWGTALIKKYPKLESEFVYGDYKVYDVRKMIAKSEQE
IGKATAKYFFYSSGGSKRTADGSEFEPKKKRKV
ABE8e-CP1028 dimer editor: NLS, wtTadA, linker, TadA*, CP1028
(SEQ ID NO: 458)
MKRTADGSEFESPKKKRKVSEVEFSHEYWMRHALTLAKRAWDEREVPVGAVLVHNNRVIGE
GWNRPIGRHDPTAHAEIMALRQGGLVMQNYRLIDATLYVTLEPCVMCAGAMIHSRIGRVV
FGARDAKTGAAGSLMDVLHHPGMNHRVEITEGILADECAALLSDFFRMRRQEIKAQKKAQ
SSTDSGGSSGGSSGSETPGTSESATPESSGGSSGGSSEVEFSHEYWMRHALTLAKRARDEREVPVGAV
LVLNNRVIGEGWNRAIGLHDPTAHAEIMALRQGGLVMQNYRLIDATLYVTFEPCVMCAGAMIHSRIGRV
VFGVRNSKRGAAGSLMNVLNYPGMNHRVEITEGILADECAALLCDFYRMPRQVFNAQKKAQSSINSGG
SSGGSSGSETPGTSESATPESSGGSSGGSEIGKATAKYFFYSNIMNFFKTEITLANGEIRKRPLIETNGET
GEIVWDKGRDFATVRKVLSMPQVNIVKKTEVQTGGFSKESILPKRNSDKLIARKKDWDPKKYGGFDSP
TVAYSVLVVAKVEKGKSKKLKSVKELLGITIMERSSFEKNPIDFLEAKGYKEVKKDLIIKLPKYSLFELEN
GRKRMLASAGELQKGNELALPSKYVNFLYLASHYEKLKGSPEDNEQKQLFVEQHKHYLDEIIEQISEFS
KRVILADANLDKVLSAYNKHRDKPIREQAENIIHLFTLTNLGAPAAFKYFDTTIDRKRYTSTKEVLDATLI
HQSITGLYETRIDLSQLGGDGGSGGSGGSGGSGGSGGSGGMDKKYSIGLAIGTNSVGWAVITDEYKVPS
KKFKVLGNTDRHSIKKNLIGALLFDSGETAEATRLKRTARRRYTRRKNRICYLQEIFSNEMAKVDDSFFH
RLEESFLVEEDKKHERHPIFGNIVDEVAYHEKYPTIYHLRKKLVDSTDKADLRLIYLALAHMIKFRGHFL
IEGDLNPDNSDVDKLFIQLVQTYNQLFEENPINASGVDAKAILSARLSKSRRLENLIAQLPGEKKNGLFG
NLIALSLGLTPNFKSNFDLAEDAKLQLSKDTYDDDLDNLLAQIGDQYADLFLAAKNLSDAILLSDILRVN
TEITKAPLSASMIKRYDEHHQDLTLLKALVRQQLPEKYKEIFFDQSKNGYAGYIDGGASQEEFYKFIKPI
LEKMDGTEELLVKLNREDLLRKQRTFDNGSIPHQIHLGELHAILRRQEDFYPFLKDNREKIEKILTFRIP
YYVGPLARGNSRFAWMTRKSEETITPWNFEEWDKGASAQSFIERMTNFDKNLPNEKVLPKHSLLYEYF
TVYNELTKVKYVTEGMRKPAFLSGEQKKAIVDLLFKTNRKVTVKQLKEDYFKKIECFDSVEISGVEDRF
NASLGTYHDLLKIIKDKDFLDNEENEDILEDIVLTLTLFEDREMIEERLKTYAHLFDDKVMKQLKRRRYT
GWGRLSRKLINGIRDKQSGKTILDFLKSDGFANRNFMQLIHDDSLTFKEDIQKAQVSGQGDSLHEHIA
NLAGSPAIKKGILQTVKVVDELVKVMGRHKPENIVIEMARENQTTQKGQKNSRERMKRIEEGIKELGSQ
ILKEHPVENTQLQNEKLYLYYLQNGRDMYVDQELDINRLSDYDVDHIVPQSFLKDDSIDNKVLTRSDKN
RGKSDNVPSEEWKKMKNYWRQLLNAKLITQRKFDNLTKAERGGLSELDKAGFIKRQLVETRQITKHV
AQILDSRMNTKYDENDKLIREVKVITLKSKLVSDFRKDFQFYKVREINNYHHAHDAYLNAWGTALIKKY
PKLESEFVYGDYKVYDVRKMIAKSEQSGGSKRTADGSEFEPKKKRKV
ABE8e-CP1028 monomer editor NLS, linker, TadA*, CP1028
(SEQ ID NO: 474)
MKRTADGSEFESPKKKRKVSEVEFSHEYWMRHALTLAKRARDEREVPVGAVLVLNNRVIGEGWNRAI
GLHDPTAHAEIMALRQGGLVMQNYRLIDATLYVTFEPCVMCAGAMIHSRIGRVVFGVRNSKRGAAGSL
MNVLNYPGMNHRVEITEGILADECAALLCDFYRMPRQVFNAQKKAQSSINSGGSSGGSSGSETPGTSE
SATPESSGGSSGGSEIGKATAKYFFYSNIMNFFKTEITLANGEIRKRPLIETNGETGEIVWDKGRDFATV
RKVLSMPQVNIVKKTEVQTGGFSKESILPKRNSDKLIARKKDWDPKKYGGFDSPTVAYSVLWAKVEKG
KSKKLKSVKELLGITIMERSSFEKNPIDFLEAKGYKEVKKDLIIKLPKYSLFELENGRKRMLASAGELQK
GNELALPSKYVNFLYLASHYEKLKGSPEDNEQKQLFVEQHKHYLDEIIEQISEFSKRVILADANLDKVLS
AYNKHRDKPIREQAENIIHLFTLTNLGAPAAFKYFDTTIDRKRYTSTKEVLDATLIHQSITGLYETRIDLSQ
LGGDGGSGGSGGSGGSGGSGGSGGMDKKYSIGLAIGTNSVGWAVITDEYKVPSKKFKVLGNTDRHSIK
KNLIGALLFDSGETAEATRLKRTARRRYTRRKNRICYLQEIFSNEMAKVDDSFFHRLEESFLVEEDKKHE
RHPIFGNIVDEVAYHEKYPTIYHLRKKLVDSTDKADLRLIYLALAHMIKFRGHFLIEGDLNPDNSDVDKL
FIQLVQTYNQLFEENPINASGVDAKAILSARLSKSRRLENLIAQLPGEKKNGLFGNLIALSLGLTPNFKSN
FDLAEDAKLQLSKDTYDDDLDNLLAQIGDQYADLFLAAKNLSDAILLSDILRVNTEITKAPLSASMIKRY
DEHHQDLTLLKALVRQQLPEKYKEIFFDQSKNGYAGYIDGGASQEEFYKFIKPILEKMDGTEELLVKLN
REDLLRKQRTFDNGSIPHQIHLGELHAILRRQEDFYPFLKDNREKIEKILTFRIPYYVGPLARGNSRFAW
MTRKSEETITPWNFEEWDKGASAQSFIERMTNFDKNLPNEKVLPKHSLLYEYFTVYNELTKVKYVTEG
MRKPAFLSGEQKKAIVDLLFKTNRKVTVKQLKEDYFKKIECFDSVEISGVEDRFNASLGTYHDLLKIIKD
KDFLDNEENEDILEDIVLTLTLFEDREMIEERLKTYAHLFDDKVMKQLKRRRYTGWGRLSRKLINGIRD
KQSGKTILDFLKSDGFANRNFMQLIHDDSLTFKEDIQKAQVSGQGDSLHEHIANLAGSPAIKKGILQTV
KVVDELVKVMGRHKPENIVIEMARENQTTQKGQKNSRERMKRIEEGIKELGSQILKEHPVENTQLQNE
KLYLYYLQNGRDMYVDQELDINRLSDYDVDHIVPQSFLKDDSIDNKVLTRSDKNRGKSDNVPSEEVVK
KMKNYWRQLLNAKLITQRKFDNLTKAERGGLSELDKAGFIKRQLVETRQITKHVAQILDSRMNTKYDE
NDKLIREVKVITLKSKLVSDFRKDFQFYKVREINNYHHAHDAYLNAVVGTALIKKYPKLESEFVYGDYKV
YDVRKMIAKSEQSGGSKRTADGSEFEPKKKRKV
ABE8e-VRQR dimer editor: NLS, wtTadA, linker, TadA*, SpCas9-VRQR
(SEQ ID NO: 460)
MKRTADGSEFESPKKKRKVSEVEFSHEYWMRHALTLAKRAWDEREVPVGAVLVHNNRVIGE
GWNRPIGRHDPTAHAEIMALRQGGLVMQNYRLIDATLYVTLEPCVMCAGAMIHSRIGRVV
FGARDAKTGAAGSLMDVLHHPGMNHRVEITEGILADECAALLSDFFRMRRQEIKAQKKAQ
SSTDSGGSSGGSSGSEYPGYSESAYPESSGGSSGGSSEVEFSHEYWMRHALTLAKRARDEREVPVGAV
LVLNNRVIGEGWNRAIGLHDPTAHAEIMALRQGGLVMQNYRLIDATLYVTFEPCVMCAGAMIHSRIGRV
VFGVRNSKRGAAGSLMNVLNYPGMNHRVEITEGILADECAALLCDFYRMPRQVFNAQKKAQSSINSGG
SSGGSSGSETPGTSESATPESSGGSSGGSDKKYSIGLAIGTNSVGWAVITDEYKVPSKKFKVLGNTDRH
SIKKNLIGALLFDSGETAEATRLKRTARRRYTRRKNRICYLQEIFSNEMAKVDDSFFHRLEESFLVEEDKK
HERHPIFGNIVDEVAYHEKYPTIYHLRKKLVDSTDKADLRLIYLALAHMIKFRGHFLIEGDLNPDNSDVD
KLFIQLVQTYNQLFEENPINASGVDAKAILSARLSKSRRLENLIAQLPGEKKNGLFGNLIALSLGLTPNFK
SNFDLAEDAKLQLSKDTYDDDLDNLLAQIGDQYADLFLAAKNLSDAILLSDILRVNTEITKAPLSASMIK
RYDEHHQDLTLLKALVRQQLPEKYKEIFFDQSKNGYAGYIDGGASQEEFYKFIKPILEKMDGTEELLVK
LNREDLLRKQRTFDNGSIPHQIHLGELHAILRRQEDFYPFLKDNREKIEKILTFRIPYYVGPLARGNSRF
AWMTRKSEETITPWNFEEVVDKGASAQSFIERMTNFDKNLPNEKVLPKHSLLYEYFTVYNELTKVKYVT
EGMRKPAFLSGEQKKAIVDLLFKTNRKVTVKQLKEDYFKKIECFDSVEISGVEDRFNASLGTYHDLLKII
KDKDFLDNEENEDILEDIVLTLTLFEDREMIEERLKTYAHLFDDKVMKQLKRRRYTGWGRLSRKLINGI
RDKQSGKTILDFLKSDGFANRNFMQLIHDDSLTFKEDIQKAQVSGQGDSLHEHIANLAGSPAIKKGILQ
TVKVVDELVKVMGRHKPENIVIEMARENQTTQKGQKNSRERMKRIEEGIKELGSQILKEHPVENTQLQ
NEKLYLYYLQNGRDMYVDQELDINRLSDYDVDHIVPQSFLKDDSIDNKVLTRSDKNRGKSDNVPSEEV
VKKMKNYWRQLLNAKLITQRKFDNLTKAERGGLSELDKAGFIKRQLVETRQITKHVAQILDSRMNTKY
DENDKLIREVKVITLKSKLVSDFRKDFQFYKVREINNYHHAHDAYLNAVVGTALIKKYPKLESEFVYGDY
KVYDVRKMIAKSEQEIGKATAKYFFYSNIMNFFKTEITLANGEIRKRPLIETNGETGEIVWDKGRDFATV
RKVLSMPQVNIVKKTEVQTGGFSKESILPKRNSDKLIARKKDWDPKKYGGFVSPTVAYSVLVVAKVEKG
KSKKLKSVKELLGITIMERSSFEKNPIDFLEAKGYKEVKKDLIIKLPKYSLFELENGRKRMLASARELQK
GNELALPSKYVNFLYLASHYEKLKGSPEDNEQKQLFVEQHKHYLDEIIEQISEFSKRVILADANLDKVLS
AYNKHRDKPIREQAENIIHLFTLTNLGAPAAFKYFDTTIDRKQYRSTKEVLDATLIHQSITGLYETRIDLSQ
LGGDSGGSKRTADGSEFEPKKKRKV
ABE8e-VRQR monomer editor: NLS, linker, TadA*, SpCas9-VRQR
(SEQ ID NO: 476)
MKRTADGSEFESPKKKRKVSEVEFSHEYWMRHALTLAKRARDEREVPVGAVLVLNNRVIGEGWNRAI
GLHDPTAHAEIMALRQGGLVMQNYRLIDATLYVTFEPCVMCAGAMIHSRIGRVVFGVRNSKRGAAGSL
MNVLNYPGMNHRVEITEGILADECAALLCDFYRMPRQVFNAQKKAQSSINSGGSSGGSSGSETPGTSE
SATPESSGGSSGGSDKKYSIGLAIGTNSVGWAVITDEYKVPSKKFKVLGNTDRHSIKKNLIGALLFDSGE
TAEATRLKRTARRRYTRRKNRICYLQEIFSNEMAKVDDSFFHRLEESFLVEEDKKHERHPIFGNIVDEVA
YHEKYPTIYHLRKKLVDSTDKADLRLIYLALAHMIKFRGHFLIEGDLNPDNSDVDKLFIQLVQTYNQLFE
ENPINASGVDAKAILSARLSKSRRLENLIAQLPGEKKNGLFGNLIALSLGLTPNFKSNFDLAEDAKLQLS
KDTYDDDLDNLLAQIGDQYADLFLAAKNLSDAILLSDILRVNTEITKAPLSASMIKRYDEHHQDLTLLKA
LVRQQLPEKYKEIFFDQSKNGYAGYIDGGASQEEFYKFIKPILEKMDGTEELLVKLNREDLLRKQRTFD
NGSIPHQIHLGELHAILRRQEDFYPFLKDNREKIEKILTFRIPYYVGPLARGNSRFAWMTRKSEETITPWN
FEEVVDKGASAQSFIERMTNFDKNLPNEKVLPKHSLLYEYFTVYNELTKVKYVTEGMRKPAFLSGEQK
KAIVDLLFKTNRKVTVKQLKEDYFKKIECFDSVEISGVEDRFNASLGTYHDLLKIIKDKDFLDNEENEDI
LEDIVLTLTLFEDREMIEERLKTYAHLFDDKVMKQLKRRRYTGWGRLSRKLINGIRDKQSGKTILDFLKS
DGFANRNFMQLIHDDSLTFKEDIQKAQVSGQGDSLHEHIANLAGSPAIKKGILQTVKVVDELVKVMGR
HKPENIVIEMARENQTTQKGQKNSRERMKRIEEGIKELGSQILKEHPVENTQLQNEKLYLYYLQNGRD
MYVDQELDINRLSDYDVDHIVPQSFLKDDSIDNKVLTRSDKNRGKSDNVPSEEVVKKMKNYWRQLLNA
KLITQRKFDNLTKAERGGLSELDKAGFIKRQLVETRQITKHVAQILDSRMNTKYDENDKLIREVKVITLK
SKLVSDFRKDFQFYKVREINNYHHAHDAYLNAVVGTALIKKYPKLESEFVYGDYKVYDVRKMIAKSEQE
IGKATAKYFFYSNIMNFFKTEITLANGEIRKRPLIETNGETGEIVWDKGRDFATVRKVLSMPQVNIVKKT
EVQTGGFSKESILPKRNSDKLIARKKDWDPKKYGGFVSPTVAYSVLWAKVEKGKSKKLKSVKELLGITI
MERSSFEKNPIDFLEAKGYKEVKKDLIIKLPKYSLFELENGRKRMLASARELQKGNELALPSKYVNFLYL
ASHYEKLKGSPEDNEQKQLFVEQHKHYLDEIIEQISEFSKRVILADANLDKVLSAYNKHRDKPIREQAE
NIIHLFTLTNLGAPAAFKYFDTTIDRKQYRSTKEVLDATLIHQSITGLYETRIDLSQLGGDSGGSKRTADG
SEFEPKKKRKV
ABE8e-NG-CP1041 dimer editor: NLS, wtTadA, linker, TadA*, SpCas9-NG-CP1041
(SEQ ID NO: 461)
MKRTADGSEFESPKKKRKVSEVEFSHEYWMRHALTLAKRAWDEREVPVGAVLVHNNRVIGE
GWNRPIGRHDPTAHAEIMALRQGGLVMQNYRLIDATLYVTLEPCVMCAGAMIHSRIGRVV
FGARDAKTGAAGSLMDVLHHPGMNHRVEITEGILADECAALLSDFFRMRRQEIKAQKKAQ
SSTDSGGSSGGSSGSETPGTSESATPESSGGSSGGSSEVEFSHEYWMRHALTLAKRARDEREVPVGAV
LVLNNRVIGEGWNRAIGLHDPTAHAEIMALRQGGLVMQNYRLIDATLYVTFEPCVMCAGAMIHSRIGRV
VFGVRNSKRGAAGSLMNVLNYPGMNHRVEITEGILADECAALLCDFYRMPRQVFNAQKKAQSSINSGG
SSGGSSGSETPGTSESATPESSGGSSGGSNIMNFFKTEITLANGEIRKRPLIETNGETGEIVWDKGRDFA
TVRKVLSMPQVNIVKKTEVQTGGFSKESIRPKRNSDKLIARKKDWDPKKYGGFVSPTVAYSVLWAKVE
KGKSKKLKSVKELLGITIMERSSFEKNPIDFLEAKGYKEVKKDLIIKLPKYSLFELENGRKRMLASARFL
QKGNELALPSKYVNFLYLASHYEKLKGSPEDNEQKQLFVEQHKHYLDEIIEQISEFSKRVILADANLDK
VLSAYNKHRDKPIREQAENIIHLFTLTNLGAPRAFKYFDTTIDRKVYRSTKEVLDATLIHQSITGLYETRID
LSQLGGDGGSGGSGGSGGSGGSGGSGGDKKYSIGLAIGTNSVGWAVITDEYKVPSKKFKVLGNTDRHS
IKKNLIGALLFDSGETAEATRLKRTARRRYTRRKNRICYLQEIFSNEMAKVDDSFFHRLEESFLVEEDKK
HERHPIFGNIVDEVAYHEKYPTIYHLRKKLVDSTDKADLRLIYLALAHMIKFRGHFLIEGDLNPDNSDVD
KLFIQLVQTYNQLFEENPINASGVDAKAILSARLSKSRRLENLIAQLPGEKKNGLFGNLIALSLGLTPNFK
SNFDLAEDAKLQLSKDTYDDDLDNLLAQIGDQYADLFLAAKNLSDAILLSDILRVNTEITKAPLSASMIK
RYDEHHQDLTLLKALVRQQLPEKYKEIFFDQSKNGYAGYIDGGASQEEFYKFIKPILEKMDGTEELLVK
LNREDLLRKQRTFDNGSIPHQIHLGELHAILRRQEDFYPFLKDNREKIEKILTFRIPYYVGPLARGNSRF
AWMTRKSEETITPWNFEEVVDKGASAQSFIERMTNFDKNLPNEKVLPKHSLLYEYFTVYNELTKVKYVT
EGMRKPAFLSGEQKKAIVDLLFKTNRKVTVKQLKEDYFKKIECFDSVEISGVEDRFNASLGTYHDLLKII
KDKDFLDNEENEDILEDIVLTLTLFEDREMIEERLKTYAHLFDDKVMKQLKRRRYTGWGRLSRKLINGI
RDKQSGKTILDFLKSDGFANRNFMQLIHDDSLTFKEDIQKAQVSGQGDSLHEHIANLAGSPAIKKGILQ
TVKWDELVKVMGRHKPENIVIEMARENQTTQKGQKNSRERMKRIEEGIKELGSQILKEHPVENTQLQ
NEKLYLYYLQNGRDMYVDQELDINRLSDYDVDHIVPQSFLKDDSIDNKVLTRSDKNRGKSDNVPSEEV
VKKMKNYWRQLLNAKLITQRKFDNLTKAERGGLSELDKAGFIKRQLVETRQITKHVAQILDSRMNTKY
DENDKLIREVKVITLKSKLVSDFRKDFQFYKVREINNYHHAHDAYLNAVVGTALIKKYPKLESEFVYGDY
KVYDVRKMIAKSEQEIGKATAKYFFYSSGGSKRTADGSEEEPKKKRKV
ABE8e-NG-CP1041 monomer editor: NLS, linker, TadA*, SpCas9-NG-CPl041
(SEQ ID NO: 459)
MKRTADGSEFESPKKKRKVSEVEFSHEYWMRHALTLAKRARDEREVPVGAVLVLNNRVIGEGWNRAI
GLHDPTAHAEIMALRQGGLVMQNYRLIDATLYVTFEPCVMCAGAMIHSRIGRVVFGVRNSKRGAAGSL
MNVLNYPGMNHRVEITEGILADECAALLCDFYRMPRQVFNAQKKAQSSINSGGSSGGSSGSETPGTSE
SATPESSGGSSGGSNIMNFFKTEITLANGEIRKRPLIETNGETGEIVWDKGRDFATVRKVLSMPQVNIVK
KTEVQTGGFSKESIRPKRNSDKLIARKKDWDPKKYGGFVSPTVAYSVLVVAKVEKGKSKKLKSVKELLG
ITIMERSSFEKNPIDFLEAKGYKEVKKDLIIKLPKYSLFELENGRKRMLASARFLQKGNELALPSKYVNF
LYLASHYEKLKGSPEDNEQKQLFVEQHKHYLDEIIEQISEFSKRVILADANLDKVLSAYNKHRDKPIREQ
AENIIHLFTLTNLGAPRAFKYFDTTIDRKVYRSTKEVLDATLIHQSITGLYETRIDLSQLGGDGGSGGSGG
SGGSGGSGGSGGDKKYSIGLAIGTNSVGWAVITDEYKVPSKKFKVLGNTDRHSIKKNLIGALLFDSGETA
EATRLKRTARRRYTRRKNRICYLQEIFSNEMAKVDDSFFHRLEESFLVEEDKKHERHPIFGNIVDEVAYH
EKYPTIYHLRKKLVDSTDKADLRLIYLALAHMIKFRGHFLIEGDLNPDNSDVDKLFIQLVQTYNQLFEEN
PINASGVDAKAILSARLSKSRRLENLIAQLPGEKKNGLFGNLIALSLGLTPNFKSNFDLAEDAKLQLSKD
TYDDDLDNLLAQIGDQYADLFLAAKNLSDAILLSDILRVNTEITKAPLSASMIKRYDEHHQDLTLLKALV
RQQLPEKYKEIFFDQSKNGYAGYIDGGASQEEFYKFIKPILEKMDGTEELLVKLNREDLLRKQRTFDN
GSIPHQIHLGELHAILRRQEDFYPFLKDNREKIEKILTFRIPYYVGPLARGNSRFAWMTRKSEETITPWNF
EEVVDKGASAQSFIERMTNFDKNLPNEKVLPKHSLLYEYFTVYNELTKVKYVTEGMRKPAFLSGEQKK
AIVDLLFKTNRKVTVKQLKEDYFKKIECFDSVEISGVEDRFNASLGTYHDLLKIIKDKDFLDNEENEDIL
EDIVLTLTLFEDREMIEERLKTYAHLFDDKVMKQLKRRRYTGWGRLSRKLINGIRDKQSGKTILDFLKS
DGFANRNFMQLIHDDSLTFKEDIQKAQVSGQGDSLHEHIANLAGSPAIKKGILQTVKWDELVKVMGR
HKPENIVIEMARENQTTQKGQKNSRERMKRIEEGIKELGSQILKEHPVENTQLQNEKLYLYYLQNGRD
MYVDQELDINRLSDYDVDHIVPQSFLKDDSIDNKVLTRSDKNRGKSDNVPSEEWKKMKNYWRQLLNA
KLITQRKFDNLTKAERGGLSELDKAGFIKRQLVETRQITKHVAQILDSRMNTKYDENDKLIREVKVITLK
SKLVSDFRKDFQFYKVREINNYHHAHDAYLNAVVGTALIKKYPKLESEFVYGDYKVYDVRKMIAKSEQE
IGKATAKYFFYSSGGSKRTADGSEFEPKKKRKV
ABE8e-iSpyMac dimer editor: NLS, wtTadA, linker, TadA*, SpCas9-iSpyMac
(SEQ ID NO: 462)
MKRTADGSEFESPKKKRKVSEVEFSHEYWMRHALTLAKRAWDEREVPVGAVLVHNNRVIGE
GWNRPIGRHDPTAHAEIMALRQGGLVMQNYRLIDATLYVTLEPCVMCAGAMIHSRIGRVV
FGARDAKTGAAGSLMDVLHHPGMNHRVEITEGILADECAALLSDFFRMRRQEIKAQKKAQ
SSTDSGGSSGGSSGSEYPGYSESAYPESSGGSSGGSSEVEFSHEYWMRHALTLAKRARDEREVPVG
AVLVLNNRVIGEGWNRAIGLHDPTAHAEIMALRQGGLVMQNYRLIDATLYVTFEPCVMCAGAMIHSRIG
RVVFGVRNSKRGAAGSLMNVLNYPGMNHRVEITEGILADECAALLCDFYRMPRQVFNAQKKAQSSINS
GGSSGGSSGSETPGTSESATPESSGGSSGGSDKKYSIGLDIGTNSVGWAVITDEYKVPSKKFKVLGNTD
RHSIKKNLIGALLFDSGETAEATRLKRTARRRYTRRKNRICYLQEIFSNEMAKVDDSFFHRLEESFLVEED
KKHERHPIFGNIVDEVAYHEKYPTIYHLRKKLVDSTDKADLRLIYLALAHMIKFRGHFLIEGDLNPDNSD
VDKLFIQLVQTYNQLFEENPINASGVDAKAILSARLSKSRRLENLIAQLPGEKKNGLFGNLIALSLGLTPN
FKSNFDLAEDAKLQLSKDTYDDDLDNLLAQIGDQYADLFLAAKNLSDAILLSDILRVNTEITKAPLSASM
IKRYDEHHQDLTLLKALVRQQLPEKYKEIFFDQSKNGYAGYIDGGASQEEFYKFIKPILEKMDGTEELL
VKLNREDLLRKQRTFDNGSIPHQIHLGELHAILRRQEDFYPFLKDNREKIEKILTFRIPYYVGPLARGNS
RFAWMTRKSEETITPWNFEEVVDKGASAQSFIERMTNFDKNLPNEKVLPKHSLLYEYFTVYNELTKVKY
VFEGMRKPAFLSGEQKKAIVDLLFKTNRKVTVKQLKEDYFKKIECFDSVEISGVEDRFNASLGTYHDLL
KIIKDKDFLDNEENEDILEDIVLTLTLFEDREMIEERLKTYAHLFDDKVMKQLKRRRYTGWGRLSRKLI
NGIRDKQSGKTILDFLKSDGFANRNFMQLIHDDSLTFKEDIQKAQVSGQGDSLHEHIANLAGSPAIKKG
ILQTVKVVDELVKVMGRHKPENIVIEMARENQTTQKGQKNSRERMKRIEEGIKELGSQILKEHPVENT
QLQNEKLYLYYLQNGRDMYVDQELDINRLSDYDVDHIVPQSFLKDDSIDNKVLTRSDKNRGKSDNVPS
EEVVKKMKNYWRQLLNAKLITQRKFDNLTKAERGGLSELDKAGFIKRQLVETRQITKHVAQILDSRMN
TKYDENDKLIREVKVITLKSKLVSDFRKDFQFYKVREINNYHHAHDAYLNAVVGTALIKKYPKLESEFVY
GDYKVYDVRKMIAKSEQEIGKATAKYFFYSNIMNFFKTEITLANGEIRKRPLIETNGETGEIVWDKGRDF
ATVRKVLSMPQVNIVKKTESGGSKRTADGSEFEPKKKRKV
ABE8e-iSpyMac monomer editor: NLS, linker, TadA*, SpCas9-iSpyMac
(SEQ ID NO: 470)
MKRYADGSEFESPKKKRKVSEVEFSHEYWMRHALTLAKRARDEREVPVGAVLVLNNRVIGEGWNRAI
GLHDPTAHAEIMALRQGGLVMQNYRLIDATLYVTFEPCVMCAGAMIHSRIGRVVFGVRNSKRGAAGSL
MNVLNYPGMNHRVEITEGILADECAALLCDFYRMPRQVFNAQKKAQSSINSGGSSGGSSGSETPGTSE
SATPESSGGSSGGSDKKYSIGLDIGTNSVGWAVITDEYKVPSKKFKVLGNTDRHSIKKNLIGALLFDSGE
TAEATRLKRTARRRYTRRKNRICYLQEIFSNEMAKVDDSFFHRLEESFLVEEDKKHERHPIFGNIVDEVA
YHEKYPTIYHLRKKLVDSTDKADLRLIYLALAHMIKFRGHFLIEGDLNPDNSDVDKLFIQLVQTYNQLFE
ENPINASGVDAKAILSARLSKSRRLENLIAQLPGEKKNGLFGNLIALSLGLTPNFKSNFDLAEDAKLQLS
KDTYDDDLDNLLAQIGDQYADLFLAAKNLSDAILLSDILRVNTEITKAPLSASMIKRYDEHHQDLTLLKA
LVRQQLPEKYKEIFFDQSKNGYAGYIDGGASQEEFYKFIKPILEKMDGTEELLVKLNREDLLRKQRTFD
NGSIPHQIHLGELHAILRRQEDFYPFLKDNREKIEKILTFRIPYYVGPLARGNSRFAWMTRKSEETITPWN
FEEVVDKGASAQSFIERMTNFDKNLPNEKVLPKHSLLYEYFTVYNELTKVKYVTEGMRKPAFLSGEQK
KAIVDLLFKTNRKVTVKQLKEDYFKKIECFDSVEISGVEDRFNASLGTYHDLLKIIKDKDFLDNEENEDI
LEDIVLTLTLFEDREMIEERLKTYAHLFDDKVMKQLKRRRYTGWGRLSRKLINGIRDKQSGKTILDFLKS
DGFANRNFMQLIHDDSLTFKEDIQKAQVSGQGDSLHEHIANLAGSPAIKKGILQTVKVVDELVKVMGR
HKPENIVIEMARENQTTQKGQKNSRERMKRIEEGIKELGSQILKEHPVENTQLQNEKLYLYYLQNGRD
MYVDQELDINRLSDYDVDHIVPQSFLKDDSIDNKVLTRSDKNRGKSDNVPSEEVVKKMKNYWRQLLNA
KLITQRKFDNLTKAERGGLSELDKAGFIKRQLVETRQITKHVAQILDSRMNTKYDENDKLIREVKVITLK
SKLVSDFRKDFQFYKVREINNYHHAHDAYLNAVVGTALIKKYPKLESEFVYGDYKVYDVRKMIAKSEQE
IGKATAKYFFYSNIMNFFKTEITLANGEIRKRPLIETNGETGEIVWDKGRDFATVRKVLSMPQVNIVKKT
ESGGSKRTADGSEFEPKKKRKV

### Reduced Off-Target Effects

### Reduced RNA Editing Effects

[0387] The adenine base editors disclosed herein have reduced and/or low RNA editing effects. In some embodiments, the base editors are evolved or engineered to have reduced RNA editing effects. The term “RNA editing effects,” as used herein, refers to the introduction of modifications (e.g. deaminations) of nucleotides within cellular RNA, e.g., messenger RNA (mRNA). An important goal of DNA base editing efficiency is the modification (e.g. deamination) of a specific nucleotide within DNA, without introducing modifications of similar nucleotides within RNA. RNA editing effects are “low” or “reduced” when a detected mutation is introduced into RNA molecules at a frequency of 0.3% or less.

[0388] The present disclosure further provides methods of administering the disclosed adenine base editors wherein the method yields reduced and/or low RNA editing effects. The present disclosure further provides adenine base editors that induce (or yield, provide or cause) reduced and/or low RNA editing effects. In some embodiments, the base editors provide an average adenosine (A) to inosine (I) (A-to-I) editing frequency in cellular mRNA transcripts of 0.3% or less. In some embodiments, the base editors provide an average adenosine (A) to inosine (I) (A-to-I) actual and/or consistent editing frequencies in RNA of about 0.3% or less. The base editors may provide actual or average A-to-I editing frequencies in RNA of about 0.5% or less, 0.4% or less, 0.35% or less, 0.25% or less, 0.2% or less, 0.15% or less, 0.12% or less, 0.1% or less, 0.08% or less, or 0.075% or less. In particular embodiments, the base editors provide an average A-to-I editing frequency of about 0.25%. In particular embodiments, the base editor ABE-8e(V106W) (SEQ ID NO: 188) induces an average A-to-I editing frequency of 0.25%.

[0389] In some embodiments, the methods induce (or provide or cause) an average adenine (A) to inosine (I) (A-to-I) editing frequency across the mRNA transcriptome of a human cell (e.g. an HEK293 cell) of about 0.3% or less. The methods may induce actual or average A-to-I transcriptome-wide editing frequencies in RNA of about 0.5% or less, 0.4% or less, 0.35% or less, 0.25% or less, 0.2% or less, 0.15% or less, 0.12% or less, 0.1% or less, 0.08% or less, or 0.075% or less. In particular embodiments, the methods induce a human mRNA transcriptome-wide average A-to-I editing frequency of 0.25%.

### Reduced Off-Target DNA Editing Effects

[0390] Guide RNA-dependent off-target base editing has been reduced through strategies including installation of mutations that increase DNA specificity into the Cas9 component of base editors, adding 5′ guanosine nucleotides to the sgRNA, or delivery of the base editor as a ribonucleoprotein complex (RNP). Guide RNA-independent off-target editing can arise from binding of the deaminase domain of a base editor to C or A bases in a Cas9-independent manner. Recent studies characterized guide RNA-independent off-target DNA editing activity of BE3, the original cytosine base editor, in mouse embryos and in rice. In contrast with BE3, ABE7.10 in these studies did not result in detectable guide RNA-independent off-target DNA mutations. However, the Examples below establish that ABE7.10 and some evolved ABE7.10 variants such as ABE-8e do in fact exhibit detectable guide RNA-independent off-target DNA mutations. However, some evolved ABE7.10 variants provided herein, such as ABE-8e(V106W), exhibit reduced Cas9-independent off-target DNA mutations relative to ABE7.10. The off-target effects of the disclosed adenine base editors may be measured using assays and methods disclosed in and International Application No. PCT/US2020/062428, filed Nov. 25, 2020, incorporated herein by reference.

[0391] In some aspects, provided herein are adenine base editors and methods of editing DNA by contacting DNA with any of these disclosed base editors that generate (or cause) reduced off-target effects. In various embodiments, methods are designed for determining the off-target editing frequencies of napDNAbp domain-independent (e.g., Cas9-independent) (or gRNA-independent) off-target editing events. Editing events may comprise deamination events of an ABE. Off-target deamination events that are dependent on the napDNAbp-guide RNA complex tend to be in sequences that have high sequence identity (e.g., greater than 60% sequence identity) to the target sequence. These types of events arise because of imperfect hybridization of the napDNAbp-guide RNA complex to sequences that share identity with the target sequence. In contrast, off-target events that occur independently of the napDNAbp-guide RNA complex arise as a result of stochastic binding of the base editor to DNA sequences (often sequences that do not share high sequence identity with the target sequence) due to an intrinsic affinity of the base editor of the nucleotide modification domain (e.g., the deaminase domain) of the base editor with DNA. NapDNAbp-independent (e.g., Cas9-independent) editing events arise in particular when the base editor is overexpressed in the system under evaluation, such as a cell or a subject.

[0392] The disclosed ABEs exhibit low off-target editing frequencies, and in particular low Cas9-independent off-target editing frequencies, while exhibiting high on-target editing efficiencies. For example, the ABE8e (V106W) base editor may exhibit off-target editing frequencies of 0.32% or less while maintaining on-target editing efficiencies of about 80% or more, in target sequences in mammalian cells. (See FIG. 3E.) As another example, the ABE8e base editor may exhibit off-target editing frequencies of 1.9% or less while maintaining on-target editing efficiencies of about 80% or more, in target sequences in mammalian cells. As another example, the ABE8e-NRCH (monomer) base editor may exhibit indel frequencies of 2.8% or less and/or average off-target editing frequencies of 5% or less, while maintaining on-target editing efficiencies of 80% in target sequences in human cells. (See FIGS. 30B, 30H.) The disclosed ABEs exhibit low to no clinically relevant off-target effects (e.g., point mutations in clinically relevant exons).

[0393] In some embodiments, the disclosed adenosine deaminases exhibit low off-target editing frequencies, and in particular low Cas9-independent off-target editing frequencies, while exhibiting high on-target editing efficiencies when used a variety of Cas homologs and other napDNAbps. In some embodiments, the TadA-8e deaminase or TadA-8e(V106W) deaminase may exhibit off-target editing frequencies of 0.32% or less while maintaining on-target editing efficiencies of about 80% or more, in target sequences in mammalian cells, when used with a variety of napDNAbps, such as SpCas9, SaCas9, CP1041, and SaKKH-Cas9.

[0394] In some embodiments, the disclosed base editors cause off-target DNA editing (e.g. off-target deamination) frequencies of less than 1.5% (such as less than 1.25%, less than 1.0%, less than 0.75%, or less than 0.5%). The disclosed base editors may further provide (or yield) on-target editing efficiencies of greater than 60% (such as greater than 70%, greater than 75%, greater than 80%, or greater than 85%) at the target nucleobase pair for one or more base editors under evaluation. These methods may yield an on-target editing efficiency of greater than 50% and a frequency of off-target editing of less than 1.5% for one or more base editors under consideration.

[0395] In some embodiments, the disclosed ABEs and editing methods comprising the step of contacting a DNA with any of the disclosed ABEs result in an actual or average off-target DNA editing frequency of about 2.0% or less, 1.75% or less, 1.5% or less, 1.2% or less, 1% or less, 0.9% or less, 0.8% or less, 0.75% or less, 0.7% or less, 0.65% or less, or 0.6% or less. In some embodiments, the disclosed editing methods result in an actual or average off-target DNA editing frequency of 0.5%, less than 0.5%, less than 0.4%, less than 0.35%, less than 0.3%, less than 0.25%, less than 0.2%, or less than 0.1%. In a particular embodiment, the methods result in an actual or average off-target DNA editing frequency of about 0.32% to about 1.3% (for instance, methods for evaluating the off-target frequencies of ABEs comprising TadA8e-V106W deaminase). These off-target editing frequencies may be obtained in sequences having any level of sequence identity to the target sequence. As used herein to refer to off-target DNA editing frequencies, the modifier “average” refers to a mean value over all editing events detected at sites other than a given target nucleobase pair (e.g., as detected by high-throughput sequencing).

[0396] In some embodiments, the disclosed editing methods further result in an actual or average Cas9-independent off-target DNA editing frequency of about 2.0% or less, 1.75% or less, 1.5% or less, 1.2% or less, 1% or less, 0.9% or less, 0.8% or less, 0.75% or less, 0.7% or less, 0.65% or less, or 0.6% or less. In other words, the disclosed editing methods further result in an actual or average off-target DNA editing frequency of about 2.0% or less, 1.75% or less, 1.5% or less, 1.2% or less, 1% or less, 0.9% or less, 0.8% or less, 0.75% or less, 0.7% or less, 0.65% or less, or 0.6% or less in sequences having 60% or less sequence identity to the target sequence. In some embodiments, the disclosed editing methods result in an actual or average off-target DNA editing frequency 0.5%, less than 0.5%, less than 0.4%, less than 0.35%, less than 0.3%, less than 0.25%, less than 0.2%, or less than 0.1%, in sequences having 60% or less sequence identity to the target sequence. In some embodiments, these editing frequencies are obtained in sequences comprising protospacer sequences having 5, 6, 7, 8, 9, 10, or more than 10 mismatches relative to protospacer sequence of the target sequence. In a particular embodiment, the methods result in an actual or average Cas9-independent off-target DNA editing frequency of 0.4% or less.

[0397] In various embodiments, the disclosed editing methods result in an on-target DNA base editing efficiency of at least about 35%, 40%, 50%, 60%, 70%, 80%, 85%, 90%, 95%, 98%, or 99% at the target nucleobase pair. The step of contacting may result in in a DNA base editing efficiency of at least about 60%, 61%, 62%, 63%, 64%, 65%, 66%, 67%, 68%, 69%, 70%, 71%, 72%, 73%, 74%, or 75%. In particular, the step of contacting results in on-target base editing efficiencies of greater than 75%. In certain embodiments, base editing efficiencies of 99% may be realized.

[0398] The adenosine deaminase variants of the disclosure (such as TadA8e) exhibit higher editing efficiencies when paired in a base editor with certain Cas9 variants than existing adenosine deaminases (e.g., TadA7.10). In some embodiments, a base editor containing any of the disclosed adenosine deaminases and a CP1028-SpCas9 napDNAbp domain exhibits at least 75% on-target editing efficiencies. In some embodiments, a base editor containing any of the disclosed adenosine deaminases and a CP1041-SpCas9 napDNAbp domain exhibits at least 60% on-target editing efficiencies. These editing efficiencies are significantly greater than corresponding efficiencies of the CP1041-ABE7.10 and CP1028-ABE7.10 adenine base editors. (See FIG. 9A.) In some embodiments, a base editor containing any of the disclosed adenosine deaminases and a Cas9-NRCH napDNAbp domain exhibits at least 60% on-target editing efficiencies at an adenine base in a clinically relevant genomic target such as an HBB gene, or an HBG promoter. This editing efficiency is significantly greater than corresponding efficiency of the ABE7.10-NRCH adenine base editor. (See FIG. 34.)

[0399] Further, the adenosine deaminase variants of the disclosure exhibit higher editing efficiencies when paired in a base editor with Cas9 homologs derived from S. aureus than existing adenosine deaminases (e.g., TadA7.10). In some embodiments, a base editor containing any of the disclosed adenosine deaminases and an SaCas9n napDNAbp domain or an SaCas9-KKH napDNAbp domain exhibits at least 38%, or at least 45%, on-target editing efficiencies. These editing efficiencies are significantly greater than corresponding efficiencies of the SaABE7.10 and SaKKH-ABE7.10 adenine base editors. (See FIGS. 10A and 13A.)

[0400] Further, the adenosine deaminase variants of the disclosure exhibit higher editing efficiencies when paired in a base editor with AsCas12a and LbCas12a homologs than existing adenosine deaminases (e.g., TadA7.10). Base editors containing a fusion of TadA7.10 to engineered AsCas12a (enAsCas12a) and LbCas12a exhibit little to no activity on adenine targets. However, in some embodiments, a base editor containing any of the disclosed adenosine deaminases and an enAsCas12a napDNAbp domain exhibits about 15% or greater adenine deamination activity. In some embodiments, a base editor containing any of the disclosed adenosine deaminases and an LbCas12a napDNAbp domain exhibits at least about 12%, 15%, or 18% adenine deamination activity. (See FIG. 11A.)

[0401] In various embodiments, the disclosed editing methods result in a ratio of on-target:off-target editing of about 25:1, 50:1, 65:1, 75:1, 80:1, 85:1, 90:1, 95:1, 100:1, 110:1, 125:1, or more than 125:1. In various embodiments, the disclosed editing methods result in a ratio of on-target:off-target editing of about 150:1, 200:1, 300:1, 400:1, 500:1, 600:1, 700:1, 800:1, 900:1, 1000:1, 1100:1, 1200:1, 1250:1, 1275:1, 1300:1, 1325:1, 1350:1, 1400:1, 1500:1, or more than 1500:1. In particular embodiments, the disclosed editing methods result in a ratio of on-target:off-target editing of about 90:1 or more in an HBG gene, such as a human HBG gene. In particular embodiments, the disclosed editing methods result in a ratio of on-target:off-target editing of about 1300:1 or more in an EMX1 gene, such as a human EMX1 gene. As used herein, a ratio of on-target:off-target editing is equivalent to a ratio of sequencing reads reflecting on-target deaminations relative to deaminations of known or predicted off-target sites, or candidate off-target sites. Candidate off-target sites may be identified, and hence the ratio of on-target:off-target editing may be measured, using an experimental assay or a computation algorithm (e.g., Cas-OFFinder). For example, candidate off-target sites may be identified using an experimental assay such as EndoV-Seq, GUIDE-Seq, or CIRCLE-Seq. In some embodiments, the ratios of on-target editing:off-target editing relies on the use of EndoV-Seq.

[0402] In some embodiments, the disclosed editing methods result in a ratio of on-target:off-target editing that is equivalent to the ratio of intended point mutations:unintended point mutations. In some embodiments, the disclosed editing methods result in a ratio of intended point mutations to unintended point mutations that is at least 25:1, at least 30:1, at least 40:1, at least 50:1, at least 75:1, at least 90:1, at least 100:1, at least 150:1, at least 200:1, at least 250:1, at least 500:1, at least 1000:1, at least 1100:1, at least 1200:1, at least 1250:1, at least 1300:1, at least 1350:1, at least 1400:1, at least 1500:1, or more.

[0403] In some embodiments, the disclosed editing methods result in, and the disclosed base editors generate, a very low degree of bystander edits (i.e., synonymous off-target point mutations at nucleobases that are near the target base and do not change the outcome of the intended editing method). In some embodiments, the disclosed editing methods result in less than 10, less than 9, less than 8, less than 7, less than 6, less than 5, less than 4, less than 3, less than 2, less than 1, or zero non-silent bystander edits. For example, editing methods using the disclosed ABE8e-NRCH editor result in zero non-silent bystander edits.

### Reduced Indel Frequencies

[0404] Some aspects of the disclosure are based on the recognition that any of the adenine base editors provided herein are capable of modifying a specific DNA base without generating a significant proportion of indels. An “indel”, as used herein, refers to the insertion or deletion of a nucleotide base within a DNA substrate. Such insertions or deletions can lead to frame shift mutations within a coding region of a gene. In some embodiments, it is desirable to generate adenine base editors that efficiently modify (e.g. mutate or deaminate) a specific nucleotide within a DNA, without generating a large number of insertions or deletions (i.e., indels) in the nucleic acid (while at the same time having lower RNA editing effects than existing adenine base editors).

[0405] In certain embodiments, any of the adenine base editors provided herein are capable of generating a greater proportion of intended modifications (e.g., point mutations or deaminations) versus indels. In some embodiments, the base editors provided herein are capable of generating a ratio of intended point mutations to indels that is greater than 1:1. In some embodiments, the base editors provided herein are capable of generating a ratio of intended point mutations to indels that is at least 1.5:1, at least 2:1, at least 2.5:1, at least 3:1, at least 3.5:1, at least 4:1, at least 4.5:1, at least 5:1, at least 5.5:1, at least 6:1, at least 6.5:1, at least 7:1, at least 7.5:1, at least 8:1, at least 10:1, at least 12:1, at least 15:1, at least 20:1, at least 25:1, at least 30:1, at least 40:1, at least 50:1, at least 100:1, at least 200:1, at least 300:1, at least 400:1, at least 500:1, at least 600:1, at least 700:1, at least 800:1, at least 900:1, or at least 1000:1, or more. The number of intended mutations and indels may be determined using any suitable method, for example the methods used in the below Examples. In some embodiments, indel frequencies correspond to the percent of total sequencing reads at a target sequence that contain indels. Accordingly, to calculate indel frequencies, sequencing reads are scanned for exact matches to two 10-bp sequences that flank both sides of a window in which indels might occur. If no exact matches are located, the read is excluded from analysis. If the length of this indel window exactly matches the reference sequence the read is classified as not containing an indel. If the indel window is two or more bases longer or shorter than the reference sequence, then the sequencing read is classified as an insertion or deletion, respectively.

[0406] In some embodiments, the adenine base editors provided herein are capable of limiting formation of indels in a region of a DNA substrate. In some embodiments, the region is at a nucleotide targeted by a base editor or a region within 2, 3, 4, 5, 6, 7, 8, 9, or 10 nucleotides of a nucleotide targeted by a base editor. In some embodiments, any of the base editors provided herein may induce an indel formation at a region of a nucleic acid at frequencies of less than 1%, less than 1.5%, less than 2%, less than 2.5%, less than 2.8%, less than 3%, less than 3.5%, less than 4%, less than 4.5%, less than 5%, less than 6%, less than 7%, less than 8%, less than 9%, less than 10%, less than 12%, less than 15%, or less than 20%. In some embodiments, any of the base editors provided herein may induce or generate less than 20%, 19%, 18%, 16%, 14%, 12%, 10%, 8%, 6%, 4%, 3%, 2%, 1%, 0.5%, 0.2%, 0.1%, or 0.05% indel formation when contacted with a nucleic acid comprising a target sequence. The number of indels formed at a nucleic acid region may depend on the amount of time a nucleic acid (e.g., a nucleic acid within the genome of a cell) is exposed to a base editor. In some embodiments, an number or proportion of indels is determined after at least 1 hour, at least 2 hours, at least 6 hours, at least 12 hours, at least 24 hours, at least 36 hours, at least 48 hours, at least 3 days, at least 4 days, at least 5 days, at least 7 days, at least 10 days, or at least 14 days of exposing a nucleic acid (e.g., a nucleic acid within the genome of a cell) to an adenine base editor.

[0407] In some embodiments, the LbABE8e base editor may induce an indel formation at a region of a nucleic acid comprising a target sequence at frequencies of less than 0.2% (see FIGS. 8B and 11B). In some embodiments, the CP1028-ABE8e and CP1041-ABE8e base editors may induce indel formation at a region of a nucleic acid comprising a target sequence at frequencies of less than 0.5% (see FIG. 9B). In some embodiments, the CP1028-ABE8e-dimer and CP1041-ABE8e-dimer base editors may induce indel formation at a region of a nucleic acid comprising a target sequence at frequencies of less than 0.5%. In some embodiments, the SaABE8e and SaKKH-ABE8e base editors may induce indel formation at a region of a nucleic acid comprising a target sequence at frequencies of less than 1.25% (see FIGS. 10B and 13B). In some embodiments, the NG-ABE8e base editor may induce indel formation at a target sequence at frequencies of less than 0.5 or less than 0.25% (see FIG. 12B).

[0408] In some embodiments, the disclosed editing methods that use the disclosed ABEs may result in less than 20%, 19%, 18%, 16%, 14%, 12%, 10%, 8%, 6%, 4%, 2%, 1.5%, 1%, 0.5%, 0.2%, or 0.1% indel formation in a a nucleic acid (e.g., a DNA) comprising a target sequence.

[0409] Some aspects of the disclosure are based on the recognition that any of the base editors provided herein are capable of efficiently generating an intended mutation, such as a point mutation, in DNA (e.g. DNA within a genome of a subject) without generating a significant number of unintended mutations, such as unintended point mutations. In some embodiments, a intended mutation is a mutation that is generated by a specific base editor bound to a gRNA, specifically designed to generate the intended mutation (e.g. deamination). In some embodiments, the intended mutation is a mutation associated with a disease or disorder, such as sickle cell disease. In some embodiments, the intended mutation is an adenine (A) to guanine (G) point mutation associated with a disease or disorder. In some embodiments, the intended mutation is a thymine (T) to cytosine (C) point mutation associated with a disease or disorder. In some embodiments, the intended mutation is an adenine (A) to guanine (G) point mutation within the coding region of a gene. In some embodiments, the intended mutation is a thymine (T) to cytosine (C) point mutation within the coding region of a gene.

[0410] In some embodiments, the intended mutation is a deamination that generates a stop codon, for example, a premature stop codon within the coding region of a gene. In some embodiments, the intended mutation is a mutation that eliminates a stop codon. In some embodiments, the intended mutation eliminates a stop codon comprising the nucleic acid sequence 5′-TAG-3′, 5′-TAA-3′, or 5′-TGA-3′.

[0411] In some embodiments, the intended mutation is a deamination that alters the regulatory sequence of a gene (e.g., a gene promoter or gene repressor). In some embodiments, the intended mutation is a deamination introduced into the gene promoter. In particular embodiments, the deamination introduced into the gene promoter leads to a decrease in the transcription of a gene operably linked to the gene promoter. In other embodiments, the deamination leads to an increase in the transcription of a gene operably linked to the gene promoter.

[0412] In some embodiments, the intended mutation is a deamination that alters the splicing of a gene. Accordingly, in some embodiments, the intended deamination results in the introduction of a splice site in a gene. In other embodiments, the intended deamination results in the removal of a splice site.

[0413] In some embodiments, any of the base editors provided herein are capable of generating a ratio of intended mutations to unintended mutations (e.g., intended point mutations:unintended point mutations) that is greater than 1:1. In some embodiments, any of the base editors provided herein are capable of generating a ratio of intended mutations to unintended mutations (e.g., intended point mutations:unintended point mutations) that is at least 1.5:1, at least 2:1, at least 2.5:1, at least 3:1, at least 3.5:1, at least 4:1, at least 4.5:1, at least 5:1, at least 5.5:1, at least 6:1, at least 6.5:1, at least 7:1, at least 7.5:1, at least 8:1, at least 10:1, at least 12:1, at least 15:1, at least 20:1, at least 25:1, at least 30:1, at least 40:1, at least 50:1, at least 100:1, at least 150:1, at least 200:1, at least 250:1, at least 500:1, or at least 1000:1, or more. It should be appreciated that the characteristics of the base editors described in this section and the following section of the disclosure may be applied to any of the base editors, or methods of using the base editors provided herein.

### Guide Sequences (e.g., Guide RNAs)

[0414] The present disclosure further provides guide RNAs for use in accordance with the disclosed methods of editing. The disclosure provides guide RNAs that are designed to recognize target sequences. Such gRNAs may be designed to have guide sequences (or “spacers”) having complementarity to a protospacer within the target sequence.

[0415] Guide RNAs are also provided for use with one or more of the disclosed adenine base editors, e.g., in the disclosed methods of editing a nucleic acid molecule. Such gRNAs may be designed to have guide sequences having complementarity to a protospacer within a target sequence to be edited, and to have backbone sequences that interact specifically with the napDNAbp domains of any of the disclosed base editors, such as Cas9 nickase domains of the disclosed base editors.

[0416] In various embodiments, the base editors may be complexed, bound, or otherwise associated with (e.g., via any type of covalent or non-covalent bond) one or more guide sequences. The guide sequence becomes associated or bound to the base editor and directs its localization to a specific target sequence having complementarity to the guide sequence or a portion thereof. The particular design embodiments of a guide sequence will depend upon the nucleotide sequence of a genomic target sequence (i.e., the desired site to be edited) and the type of napDNAbp (e.g., type of Cas9 protein) present in the base editor, among other factors, such as PAM sequence locations, percent G/C content in the target sequence, the degree of microhomology regions, secondary structures, etc.

[0417] In general, a guide sequence is any polynucleotide sequence having sufficient complementarity with a target polynucleotide sequence to hybridize with the target sequence and direct sequence-specific binding of the napDNAbp (e.g., a Cas9 or Cas9 variant) to the target sequence. In some embodiments, the degree of complementarity between a guide sequence and its corresponding target sequence, when optimally aligned using a suitable alignment algorithm, is about or more than about 50%, 60%, 75%, 80%, 85%, 90%, 95%, 97.5%, 99%, or more. Optimal alignment may be determined with the use of any suitable algorithm for aligning sequences, non-limiting example of which include the Smith-Waterman algorithm, the Needleman-Wunsch algorithm, algorithms based on the Burrows-Wheeler Transform (e.g., the Burrows Wheeler Aligner), ClustalW, Clustal X, BLAT, Novoalign (Novocraft Technologies, ELAND (Illumina, San Diego, Calif.), SOAP (available at soap.genomics.org.cn), and Maq (available at maq.sourceforge.net).

[0418] In some embodiments, a guide sequence is about or more than about 5, 10, 11, 12, 13, 14, 15, 16, 17, 18, 19, 20, 21, 22, 23, 24, 25, 26, 27, 28, 29, 30, 35, 40, 45, 50, 75, or more nucleotides in length. In some embodiments, each gRNA comprises a guide sequence of at least 10 contiguous nucleotides (e.g., 10, 11, 12, 13, 14, 15, 16, 17, 18, 19, 20, 21, 22, 23, 24, 25, 26, 27, 28, 29, or 30 contiguous nucleotides) that is complementary to a target sequence (or off-target site).

[0419] In some embodiments, a guide sequence is less than about 75, 50, 45, 40, 35, 30, 25, 20, 15, 12, or fewer nucleotides in length. The ability of a guide sequence to direct sequence-specific binding of a base editor to a target sequence may be assessed by any suitable assay. For example, the components of a base editor, including the guide sequence to be tested, may be provided to a host cell having the corresponding target sequence, such as by transfection with vectors encoding the components of a base editor disclosed herein, followed by an assessment of preferential cleavage within the target sequence. Similarly, cleavage of a target polynucleotide sequence may be evaluated in situ by providing the target sequence, components of a base editor, including the guide sequence to be tested and a control guide sequence different from the test guide sequence, and comparing binding or rate of cleavage at the target sequence between the test and control guide sequence reactions. Other assays are possible, and will occur to those skilled in the art.

[0420] A guide sequence may be selected to target any target sequence. In some embodiments, the target sequence is a sequence within a genome of a cell. Exemplary target sequences include those that are unique in the target genome.

[0421] In some embodiments, a guide sequence is selected to reduce the degree of secondary structure within the guide sequence. Secondary structure may be determined by any suitable polynucleotide folding algorithm. Some programs are based on calculating the minimal Gibbs free energy. An example of one such algorithm is mFold, as described by Zuker & Stiegler (Nucleic Acids Res. 9 (1981), 133-148). Another example folding algorithm is the online webserver RNAfold, developed at Institute for Theoretical Chemistry at the University of Vienna, using the centroid structure prediction algorithm (see, e.g., A. R. Gruber et al., 2008, Cell 106(1): 23-24; and PA Carr & GM Church, 2009, Nature Biotechnology 27(12): 1151-62). Additional algorithms may be found in Chuai, G. et al., DeepCRISPR: optimized CRISPR guide RNA design by deep learning, Genome Biol. 19:80 (2018), and U.S. Application Ser. No. 61/836,080 and U.S. Pat. No. 8,871,445, issued Oct. 28, 2014, the entireties of each of which are incorporated herein by reference.

[0422] The guide sequence of the gRNA is linked to a tracr mate (also known as a “backbone”) sequence which in turn hybridizes to a tracr sequence. A tracr mate sequence includes any sequence that has sufficient complementarity with a tracr sequence to promote one or more of: (1) excision of a guide sequence flanked by tracr mate sequences in a cell containing the corresponding tracr sequence; and (2) formation of a complex at a target sequence, wherein the complex comprises the tracr mate sequence hybridized to the tracr sequence. In general, degree of complementarity is with reference to the optimal alignment of the tracr mate sequence and tracr sequence, along the length of the shorter of the two sequences. Optimal alignment may be determined by any suitable alignment algorithm, and may further account for secondary structures, such as self-complementarity within either the tracr sequence or tracr mate sequence. In some embodiments, the degree of complementarity between the tracr sequence and tracr mate sequence along the length of the shorter of the two when optimally aligned is about or more than about 25%, 30%, 40%, 50%, 60%, 70%, 80%, 90%, 95%, 97.5%, 99%, or higher. In some embodiments, the tracr sequence is about or more than about 5, 6, 7, 8, 9, 10, 11, 12, 13, 14, 15, 16, 17, 18, 19, 20, 25, 30, 40, 50, or more nucleotides in length. In some embodiments, the tracr sequence and tracr mate sequence are contained within a single transcript, such that hybridization between the two produces a transcript having a secondary structure, such as a hairpin. Preferred loop forming sequences for use in hairpin structures are four nucleotides in length, and most preferably have the sequence GAAA. However, longer or shorter loop sequences may be used, as may alternative sequences. The sequences preferably include a nucleotide triplet (for example, AAA), and an additional nucleotide (for example C or G). Examples of loop forming sequences include CAAA and AAAG. In an embodiment of the invention, the transcript or transcribed polynucleotide sequence has at least two or more hairpins. In certain embodiments, the transcript has two, three, four or five hairpins. In a further embodiment of the invention, the transcript has at most five hairpins. In some embodiments, the single transcript further includes a transcription termination sequence; preferably this is a polyT sequence, for example six T nucleotides.

[0423] Non-limiting examples of single (DNA) polynucleotides comprising a guide sequence, a tracr mate sequence, and a tracr sequence are as follows (listed 5′ to 3′), where “N” represents a base of a guide sequence, the first block of lower case letters represent the tracr mate sequence, and the second block of lower case letters represent the tracr sequence, and the final poly-T sequence represents the transcription terminator:

(1) NNNNNNNNgtttttgtactctcaagatttaGAAAtaaatcttgcagaagctacaaagataaggctt catgccgaaatcaacaccctgtcattttatggcagggtgttttcgttatttaaTTTTTT (SEQ ID NO: 333);
(2) NNNNNNNNNNNNNNNNNNgtttttgtactctcaGAAAtgcagaagctacaaagataaggcttcatgccgaaatca acaccctgtcattttatggcagggtgttttcgttatttaaTTTTTT (SEQ ID NO: 334);
(3) NNNNNNNNNNNNNNNNNNNNgtttttgtactctcaGAAAtgcagaagctacaaagataaggcttcatgccgaa atcaacaccctgtcattttatggcagggtgtTTTTT (SEQ ID NO: 335);
(4) NNNNNNNNNNNNNNNNNNNNgttttagagctaGAAAtagcaagttaaaataaggctagtccgttatcaacttg aaaaagtggcaccgagtcggtgcTTTTTT (SEQ ID NO: 336);
(5) NNNNNNNNNNNNNNNNNNNgttttagagctaGAAATAGcaagttaaaataaggctagtccgttatcaacttga aaaagtgTTTTTTT (SEQ ID NO: 337); and
(6) NNNNNNNNNNNNNNNNNNNNgttttagagctagAAATAGcaagttaaaataaggctagtccgttatcaTT TTTTTT (SEQ ID NO: 338). In some embodiments, sequences (1) to (3) are used in combination with Cas9 from S. Thermophiles CRISPR1. In some embodiments, sequences (4) to (6) are used in combination with Cas9 from S. pyogenes. In some embodiments, the tracr sequence is a separate transcript from a transcript comprising the tracr mate sequence.

[0424] In some embodiments, the guide RNAs for use in accordance with the disclosed methods of editing comprise synthetic single guide RNAs (sgRNAs) containing modified ribonucleotides. In some embodiments, the guide RNAs contain modifications such as 2′-O-methylated nucleotides and phosphorothioate linkages. In some embodiments, the guide RNAs contain 2′-O-methyl modifications in the first three and last three nucleotides, and phosphorothioate bonds between the first three and last three nucleotides. Exemplary modified synthetic sgRNAs are disclosed in Hendel A. et al., Nat. Biotechnol. 33, 985-989 (2015), herein incorporated by reference.

[0425] In some embodiments, the guide RNAs for use in accordance with the disclosed methods of editing comprise a backbone structure that is recognized by an S. pyogenes Cas9 protein or domain, such as an SpCas9 domain of the disclosed base editors. The backbone structure recognized by an SpCas9 protein may comprise the sequence 5′-[guide sequence]-guuuuagagcuagaaauagcaaguuaaaauaaggcuaguccguuaucaacuugaaaaaguggcaccgagucggugcuuuuu-3′ (SEQ ID NO: 339), wherein the guide sequence comprises a sequence that is complementary to the protospacer of the target sequence. See U.S. Publication No. 2015/0166981, published Jun. 18, 2015, the disclosure of which is incorporated by reference herein. The guide sequence is typically 20 nucleotides long.

[0426] In other embodiments, the guide RNAs for use in accordance with the disclosed methods of editing comprise a backbone structure that is recognized by an S. aureus Cas9 protein. The backbone structure recognized by an SaCas9 protein may comprise the sequence 5′-[guide sequence]-guuuuaguacucuguaaugaaaauuacagaaucuacuaaaacaaggcaaaaugccguguuuaucucgucaacuuguuggcga gauuuuuuu-3′ (SEQ ID NO: 78).

[0427] In other embodiments, the guide RNAs for use in accordance with the disclosed methods of editing comprise a backbone structure that is recognized by an Lachnospiraceae bacterium Cas12a protein. The backbone structure recognized by an LbCas12a protein may comprise the sequence 5′-[guide sequence]-uaauuucuacuaaguguagau-3′ (SEQ ID NO: 445).

[0428] In other embodiments, the guide RNAs for use in accordance with the disclosed methods of editing comprise a backbone structure that is recognized by an Acidaminococcus sp. BV3L6 Cas12a protein. The backbone structure recognized by an AsCas12a protein may comprise the sequence 5′-[guide sequence]-uaauuucuacucuuguagau-3′ (SEQ ID NO: 446).

[0429] The sequences of suitable guide RNAs for targeting the disclosed ABEs to specific genomic target sites will be apparent to those of skill in the art based on the present disclosure. Such suitable guide RNA sequences typically comprise guide sequences that are complementary to a nucleic sequence within 50 nucleotides upstream or downstream of the target nucleobase pair to be edited. Some exemplary guide RNA sequences suitable for targeting any of the provided ABEs to specific target sequences are provided herein. Additional guide sequences are well known in the art and may be used with the base editors described herein. Additional exemplary guide sequences are disclosed in, for example, Jinek M., et al., Science 337:816-821(2012); Mali P, Esvelt K M & Church G M (2013) Cas9 as a versatile tool for engineering biology, Nature Methods, 10, 957-963; Li J F et al., (2013) Multiplex and homologous recombination-mediated genome editing in Arabidopsis and Nicotiana benthamiana using guide RNA and Cas9, Nature Biotechnology, 31, 688-691; Hwang, W. Y. et al., Efficient genome editing in zebrafish using a CRISPR-Cas system, Nature Biotechnology 31, 227-229 (2013); Cong L et al., (2013) Multiplex genome engineering using CRIPSR/Cas systems, Science, 339, 819-823; Cho S W et al., (2013) Targeted genome engineering in human cells with the Cas9 RNA-guided endonuclease, Nature Biotechnology, 31, 230-232; Jinek, M. et al., RNA-programmed genome editing in human cells, eLife 2, e00471 (2013); Dicarlo, J. E. et al., Genome engineering in Saccharomyces cerevisiae using CRISPR-Cas systems. Nucleic Acid Res. (2013); Briner A E et al., (2014) Guide RNA functional modules direct Cas9 activity and orthogonality, Mol Cell, 56, 333-339, the entire contents of each of which are incorporated herein by reference.

### Methods for Making the Adenine Base Editors

[0430] The invention further relates in various aspects to methods of making the disclosed improved adenine base editors by various modes of manipulation that include, but are not limited to, codon optimization to achieve greater expression levels in a cell, and the use of nuclear localization sequences (NLSs), preferably at least two NLSs, e.g., two bipartite NLSs, to increase the localization of the expressed base editors into a cell nucleus.

### Preparation of Base Editors for Increased Expression in Cells

[0431] The adenine base editors contemplated herein can include modifications that result in increased expression, for example, through codon optimization.

[0432] In some embodiments, the base editors (or a component thereof) is codon optimized for expression in particular cells, such as eukaryotic cells. The eukaryotic cells may be those of or derived from a particular organism, such as a mammal, including, but not limited to, human, mouse, rat, rabbit, dog, or non-human primate. In general, codon optimization refers to a process of modifying a nucleic acid sequence for enhanced expression in the host cells of interest by replacing at least one codon (e.g. about or more than about 1, 2, 3, 4, 5, 10, 15, 20, 25, 50, or more codons) of the native sequence with codons that are more frequently or most frequently used in the genes of that host cell while maintaining the native amino acid sequence. Various species exhibit particular bias for certain codons of a particular amino acid. Codon bias (differences in codon usage between organisms) often correlates with the efficiency of translation of messenger RNA (mRNA), which is in turn believed to be dependent on, among other things, the properties of the codons being translated and the availability of particular transfer RNA (tRNA) molecules. The predominance of selected tRNAs in a cell is generally a reflection of the codons used most frequently in peptide synthesis. Accordingly, genes can be tailored for optimal gene expression in a given organism based on codon optimization. Codon usage tables are readily available, for example, at the “Codon Usage Database”, and these tables can be adapted in a number of ways. See Nakamura, Y., et al. “Codon usage tabulated from the international DNA sequence databases: status for the year 2000” Nucl. Acids Res. 28:292 (2000). Computer algorithms for codon optimizing a particular sequence for expression in a particular host cell are also available, such as Gene Forge (Aptagen; Jacobus, Pa.), are also available. In some embodiments, one or more codons (e.g. 1, 2, 3, 4, 5, 10, 15, 20, 25, 50, or more, or all codons) in a sequence encoding a CRISPR enzyme correspond to the most frequently used codon for a particular amino acid.

[0433] The above description is meant to be non-limiting with regard to making base editors having increased expression, and thereby increase editing efficiencies.

### Directed Evolution Methods (e.g., PACE or PANCE)

[0434] Various embodiments of the disclosure relate to providing directed evolution methods and systems (e.g., appropriate vectors, cells, phage, flow vessels, etc.) for engineering of the base editors or base editor domains of the present disclosure. The disclosure provides vector systems for the disclosed directed evolution methods to engineer any of the disclosed base editors or base editor fomains (e.g., the adenosine deaminase domains of any of the disclosed base editors).

[0435] The directed evolution vector systems and methods provided herein allow for a gene of interest (e.g., a base editor- or adenosine deaminase-encoding gene) in a viral vector to be evolved over multiple generations of viral life cycles in a flow of host cells to acquire a desired function or activity.

[0436] Some embodiments of this disclosure provide methods of phage-assisted continuous evolution (PACE) comprising (a) contacting a population of bacterial host cells with a population of bacteriophages that comprise a gene of interest to be evolved and that are deficient in a gene required for the generation of infectious phage, wherein (1) the phage allows for expression of the gene of interest in the host cells; (2) the host cells are suitable host cells for phage infection, replication, and packaging; and (3) the host cells comprise an expression construct encoding the gene required for the generation of infectious phage, wherein expression of the gene is dependent on a function of a gene product of the gene of interest. In some embodiments, the method further comprises (b) incubating the population of host cells under conditions allowing for the mutation of the gene of interest, the production of infectious phage, and the infection of host cells with phage, wherein infected cells are removed from the population of host cells, and wherein the population of host cells is replenished with fresh host cells that have not been infected by the phage. In some embodiments, the method further comprises (c) isolating a mutated phage replication product encoding an evolved protein from the population of host cells.

[0437] In PACE, the gene under selection is encoded on the M13 bacteriophage genome. Its activity is linked to M13 propagation by controlling expression of gene III so that only active variants produce infectious progeny phage. Phage are continuously propagated and mutagenized, but mutations accumulate only in the phage genome, not the host or its selection circuit, because fresh host cells are continually flowed into (and out of) the growth vessel, effectively resetting the selection background.

### Development of a PANCE/PACE Evolution Circuit

[0438] PACE enables the rapid continuous evolution of biomolecules through many generations of mutation, selection, and replication per day (FIG. 1A)^{12, 13, 29-39}. During PACE, host E. coli cells continuously dilute a population of bacteriophage (selection phage, SP) containing the gene of interest. The gene of interest replaces gene III on the SP, which is required for progeny phage infectivity. SP containing desired gene variants trigger host-cell gene III expression from an accessory plasmid (AP). Host-cell DNA plasmids encode a genetic circuit that links the desired activity of the protein encoded in the SP to the expression of gene III on the AP. Thus, SP variants containing desired gene variants can propagate, while phage encoding inactive variants do not generate infectious progeny and are rapidly diluted out of the culture vessel (or lagoon). An arabinose-inducible mutagenesis plasmid (MP) controls the phage mutation rate.

[0439] The key to new PACE selections is linking gene III expression to the activity of interest. A low stringency selection was designed in which base editing activates T7 RNA polymerase, which transcribes gIII. A single editing event can lead to high output amplification immediately upon transcription of the edited DNA. Reference is made to International Patent Publication WO 2019/023680, published Jan. 31, 2019; Badran, A. H. & Liu, D. R. In vivo continuous directed evolution. Curr. Opin. Chem. Biol. 24, 1-10 (2015); Dickinson, B. C., Packer, M. S., Badran, A. H. & Liu, D. R. A system for the continuous directed evolution of proteases rapidly reveals drug-resistance mutations. Nat. Commun. 5, 5352 (2014); Hubbard, B. P. et al. Continuous directed evolution of DNA-binding proteins to improve TALEN specificity. Nat. Methods 12, 939-942 (2015); Wang, T., Badran, A. H., Huang, T. P. & Liu, D. R. Continuous directed evolution of proteins with improved soluble expression. Nat. Chem. Biol. 14, 972-980 (2018), and Thuronyi, B. W. et al. Continuous evolution of base editors with expanded target compatibility and improved activity. Nat. Biotechnol., 1070-1079 (2019), each of which is herein incorporated by reference.

[0440] The disclosure provides vector systems for performing directed evolution of adenosine deaminase domains of an adenine base editor. In some embodiments, the vector systems comprise an expression construct that comprises a nucleic acid encoding a split intein portion (e.g., the N-terminal portion or the C-terminal portion of a split intein) operably linked to a nucleic acid encoding a gene required for the production of infectious phage particles, such as gIII protein (pIII protein), or a portion (e.g., fragment) thereof. In some embodiments, the split intein portion is the C-terminal portion of a split intein (e.g., the C-terminal portion of an Npu (Nostoc punctiforme) split intein). In some embodiments, the split intein C-terminal portion is positioned upstream of (e.g., 5′ relative to) the nucleic acid encoding the gene required for the production of infectious phage particles, or portion thereof. In some embodiments, the split intein portion is the N-terminal portion of a split intein (e.g., the N-terminal portion of an Npu split intein). In some embodiments, the split intein N-terminal portion is positioned downstream of (e.g., 3′ relative to) the nucleic acid encoding the gene required for the production of infectious phage particles, or portion thereof. In some embodiments, the disclosed vector system expression constructs (e.g., in a first accessory plasmid or second accessory plasmid) further comprises a sequence encoding luxAB.

[0441] In some embodiments, the vector systems described herein comprising: (i) a selection plasmid comprising an isolated nucleic acid comprising an expression construct encoding an adenosine deaminase comprising, in the following order: an adenosine deaminase protein and a sequence encoding an N-terminal portion of a split intein; (ii) a first accessory plasmid comprising an isolated nucleic acid comprising an expression construct comprising, in the following order: a sequence encoding a guide RNA operably controlled by a Lac promoter and a sequence encoding a M13 phage gIII protein signal peptide operably controlled by a T7 RNA promoter, wherein the sequence encoding the gIII protein signal peptide lacks one or more nucleic acid bases of the signal peptide domain; (iii) a second accessory plasmid comprising an isolated nucleic acid comprising an expression construct comprising, in the following order: a sequence encoding the C-terminal portion of a split intein and a sequence encoding a dCas9; and (iv) a third accessory plasmid comprising an isolated nucleic acid comprising an expression construct comprising, in the following order: a promoter, a ribosome binding site, and a sequence encoding a T7 RNA polymerase (RNAP) comprising mutations that give rise to two stop codons that can be corrected upon adenine base editing (see FIGS. 1B and 18). In some embodiments, the split intein is an Npu split intein. In some embodiments, these stop codons are created at positions 57 and 58. In some embodiments, adenine base editing corrects mutations at positions 57 and 58 in the T7 RNAP coding region and induces substitution back to the wild-type Q57 and R58 (see FIG. 1C). In certain embodiments, the disclosed vector systems further comprise a plurality of third accessory plasmids, each comprising a unique ribosome binding site or a unique promoter. As many as five, six, seven, eight, nine, or ten variants of the third accessory plasmid may be developed with different promoters and ribosome binding sites (RBS) to tune the negative stringency of the PACE evolution. In certain embodiments, the vector systems further comprise a mutagenesis plasmid.

[0442] In some embodiments, a vector system is provided as part of a kit, which is useful, in some embodiments, for performing PACE to produce adenosine deaminase protein variants. For example, in some embodiments, a kit comprises a first container housing the selection phagemid of the vector system, a second container housing the first accessory plasmid of the vector system, and a third container housing the second accessory plasmid of the vector system. In some embodiments, a kit further comprises a mutagenesis plasmid. Mutagenesis plasmids for PACE are generally known in the art, and are described, for example in International PCT Application No. PCT/US2016/027795, filed Sep. 16, 2016, published as WO 2016/168631, the entire contents of which are incorporated herein by reference. In some embodiments, the kit further comprises a set of written or electronic instructions for performing PACE.

[0443] In some embodiments of the directed evolution methods and systems provided herein, the viral vector or the phage is a filamentous phage, for example, an M13 phage, such as an M13 selection phage as described in more detail elsewhere herein. In some such embodiments, the gene required for the production of infectious viral particles is the M13 gene III (gIII).

[0444] In some embodiments, the incubating of the host cells is for a time sufficient for at least 10, at least 20, at least 30, at least 40, at least 50, at least 100, at least 200, at least 300, at least 400, at least, 500, at least 600, at least 700, at least 800, at least 900, at least 1000, at least 1250, at least 1500, at least 1750, at least 2000, at least 2500, at least 3000, at least 4000, at least 5000, at least 7500, at least 10000, or more consecutive viral life cycles. In certain embodiments, the viral vector is an M13 phage, and the length of a single viral life cycle is about 10-20 minutes.

[0445] In some embodiments, a viral vector/host cell combination is chosen in which the life cycle of the viral vector is significantly shorter than the average time between cell divisions of the host cell. Average cell division times and viral vector life cycle times are well known in the art for many cell types and vectors, allowing those of skill in the art to ascertain such host cell/vector combinations. In certain embodiments, host cells are being removed from the population of host cells contacted with the viral vector at a rate that results in the average time of a host cell remaining in the host cell population before being removed to be shorter than the average time between cell divisions of the host cells, but to be longer than the average life cycle of the viral vector employed. The result of this is that the host cells, on average, do not have sufficient time to proliferate during their time in the host cell population while the viral vectors do have sufficient time to infect a host cell, replicate in the host cell, and generate new viral particles during the time a host cell remains in the cell population. This assures that the only replicating nucleic acid in the host cell population is the viral vector, and that the host cell genome, the accessory plasmid, or any other nucleic acid constructs cannot acquire mutations allowing for escape from the selective pressure imposed.

[0446] For example, in some embodiments, the average time a host cell remains in the host cell population is about 10, about 11, about 12, about 13, about 14, about 15, about 16, about 17, about 18, about 19, about 20, about 21, about 22, about 23, about 24, about 25, about 30, about 35, about 40, about 45, about 50, about 55, about 60, about 70, about 80, about 90, about 100, about 120, about 150, or about 180 minutes.

[0447] In some embodiments, the average time a host cell remains in the host cell population depends on how fast the host cells divide and how long infection (or conjugation) requires. In general, the flow rate should be faster than the average time required for cell division, but slow enough to allow viral (or conjugative) propagation. The former will vary, for example, with the media type, and can be delayed by adding cell division inhibitor antibiotics (FtsZ inhibitors in E. coli, etc.). Since the limiting step in continuous evolution is production of the protein required for gene transfer from cell to cell, the flow rate at which the vector washes out will depend on the current activity of the gene(s) of interest. In some embodiments, titratable production of the protein required for the generation of infectious particles, as described herein, can mitigate this problem. In some embodiments, an indicator of phage infection allows computer-controlled optimization of the flow rate for the current activity level in real-time.

[0448] In some embodiments, the fresh host cells comprise the accessory plasmid required for selection of viral vectors, for example, the accessory plasmid comprising the gene required for the generation of infectious phage particles that is lacking from the phages being evolved. In some embodiments, the host cells are generated by contacting an uninfected host cell with the relevant vectors, for example, the accessory plasmid and, optionally, a mutagenesis plasmid, and growing an amount of host cells sufficient for the replenishment of the host cell population in a continuous evolution experiment. Methods for the introduction of plasmids and other gene constructs into host cells are well known to those of skill in the art and the invention is not limited in this respect. For bacterial host cells, such methods include, but are not limited to, electroporation and heat-shock of competent cells.

[0449] In some embodiments, the accessory plasmid comprises a selection marker, for example, an antibiotic resistance marker, and the fresh host cells are grown in the presence of the respective antibiotic to ensure the presence of the plasmid in the host cells. Where multiple plasmids are present, different markers are typically used. Such selection markers and their use in cell culture are known to those of skill in the art, and the invention is not limited in this respect.

[0450] In particular embodiments, a first accessory plasmid comprises gene III, and a second accessory plasmid comprises a T7 RNAP gene deactivated by a G to T mutation, which results in an early stop codon. A third accessory plasmid may comprise a nucleotide encoding a dCas9 fused at the N terminus to the C-terminal half of a fast-splicing intein. An exemplary phage plasmid may comprise a nucleotide encoding an adenosine deaminase fused at the C terminus to the N-terminal half of the fast-splicing intein. The full-length base editor is reconstituted from the two intein components.

[0451] In some embodiments, the selection marker is a spectinomycin antibiotic resistance marker. In other embodiments, the selection marker is a chloramphenicol or carbenicillin resistance marker. Cells may be transformed with a selection plasmid containing an inactivated spectinomycin resistance gene with a mutation at an active site that requires A:T to C:G editing to correct. Cells that fail to install the correct transversion mutation in the spectinomycin resistance gene will die, while cells that make the correction will survive. E. coli cells expressing an sgRNA targeting the active site mutation in the spectinomycin resistance gene and a nucleotide modification domain-dCas9 base editor are plated onto 2×YT agar with 256 μg/mL of spectinomycin. Surviving colonies (measured through CFUs) were sequenced to find consensus mutations in the base editors expressed in the evolved survivors. A similar selection assay was used to evolve adenosine deaminase activity in DNA during adenine base editor development, as described in Gaudelli, N. M. et al., Programmable base editing of A•T to G•C in genomic DNA without DNA cleavage. Nature 551, 464-471 (2017), incorporated herein in its entirety by reference.

[0452] In some embodiments, the host cell population in a continuous evolution experiment is replenished with fresh host cells growing in a parallel, continuous culture. In some embodiments, the cell density of the host cells in the host cell population contacted with the viral vector and the density of the fresh host cell population is substantially the same.

[0453] Typically, the cells being removed from the cell population contacted with the viral vector comprise cells that are infected with the viral vector and uninfected cells. In some embodiments, cells are being removed from the cell populations continuously, for example, by effecting a continuous outflow of the cells from the population. In other embodiments, cells are removed semi-continuously or intermittently from the population. In some embodiments, the replenishment of fresh cells will match the mode of removal of cells from the cell population, for example, if cells are continuously removed, fresh cells will be continuously introduced. However, in some embodiments, the modes of replenishment and removal may be mismatched, for example, a cell population may be continuously replenished with fresh cells, and cells may be removed semi-continuously or in batches.

[0454] In some embodiments, the rate of fresh host cell replenishment and/or the rate of host cell removal is adjusted based on quantifying the host cells in the cell population. For example, in some embodiments, the turbidity of culture media comprising the host cell population is monitored and, if the turbidity falls below a threshold level, the ratio of host cell inflow to host cell outflow is adjusted to effect an increase in the number of host cells in the population, as manifested by increased cell culture turbidity. In other embodiments, if the turbidity rises above a threshold level, the ratio of host cell inflow to host cell outflow is adjusted to effect a decrease in the number of host cells in the population, as manifested by decreased cell culture turbidity. Maintaining the density of host cells in the host cell population within a specific density range ensures that enough host cells are available as hosts for the evolving viral vector population, and avoids the depletion of nutrients at the cost of viral packaging and the accumulation of cell-originated toxins from overcrowding the culture.

[0455] In some embodiments, the cell density in the host cell population and/or the fresh host cell density in the inflow is about 10² cells/ml to about 10¹² cells/ml. In some embodiments, the host cell density is about 10² cells/ml, about 10³ cells/ml, about 10⁴ cells/ml, about 10⁵ cells/ml, about 5·10⁵ cells/ml, about 10⁶ cells/ml, about 5.10⁶ cells/ml, about 10⁷ cells/ml, about 5·10⁷ cells/ml, about 10⁸ cells/ml, about 5.10⁸ cells/ml, about 10⁹ cells/ml, about 5·10⁹ cells/ml, about 10¹⁰ cells/ml, or about 5.10¹⁰ cells/ml. In some embodiments, the host cell density is more than about 10¹⁰ cells/ml.

[0456] In some embodiments, the host cell population is contacted with a mutagen. In some embodiments, the cell population contacted with the viral vector (e.g., the phage), is continuously exposed to the mutagen at a concentration that allows for an increased mutation rate of the gene of interest, but is not significantly toxic for the host cells during their exposure to the mutagen while in the host cell population. In other embodiments, the host cell population is contacted with the mutagen intermittently, creating phases of increased mutagenesis, and accordingly, of increased viral vector diversification. For example, in some embodiments, the host cells are exposed to a concentration of mutagen sufficient to generate an increased rate of mutagenesis in the gene of interest for about 10%, about 20%, about 50%, or about 75% of the time.

[0457] In some embodiments, the host cells comprise a mutagenesis expression construct, for example, in the case of bacterial host cells, a mutagenesis plasmid. In some embodiments, the mutagenesis plasmid comprises a gene expression cassette encoding a mutagenesis-promoting gene product, for example, a proofreading-impaired DNA polymerase. In other embodiments, the mutagenesis plasmid, including a gene involved in the SOS stress response, (e.g., UmuC, UmuD′, and/or RecA). In some embodiments, the mutagenesis-promoting gene is under the control of an inducible promoter. Suitable inducible promoters are well known to those of skill in the art and include, for example, arabinose-inducible promoters, tetracycline or doxycyclin-inducible promoters, and tamoxifen-inducible promoters. In some embodiments, the host cell population is contacted with an inducer of the inducible promoter in an amount sufficient to effect an increased rate of mutagenesis. For example, in some embodiments, a bacterial host cell population is provided in which the host cells comprise a mutagenesis plasmid in which a dnaQ926, UmuC, UmuD′, and RecA expression cassette is controlled by an arabinose-inducible promoter. In some such embodiments, the population of host cells is contacted with the inducer, for example, arabinose in an amount sufficient to induce an increased rate of mutation.

[0458] In some embodiments, diversifying the viral vector population is achieved by providing a flow of host cells that does not select for gain-of-function mutations in the gene of interest for replication, mutagenesis, and propagation of the population of viral vectors. In some embodiments, the host cells are host cells that express all genes required for the generation of infectious viral particles, for example, bacterial cells that express a complete helper phage, and, thus, do not impose selective pressure on the gene of interest. In other embodiments, the host cells comprise an accessory plasmid comprising a conditional promoter with a baseline activity sufficient to support viral vector propagation even in the absence of significant gain-of-function mutations of the gene of interest. This can be achieved by using a “leaky” conditional promoter, by using a high-copy number accessory plasmid, thus amplifying baseline leakiness, and/or by using a conditional promoter on which the initial version of the gene of interest effects a low level of activity while a desired gain-of-function mutation effects a significantly higher activity.

[0459] Detailed methods of procedures for directing continuous evolution of base editors in a population of host cells using phage particles are disclosed in International PCT Application, PCT/US2009/056194, filed Sep. 8, 2009, published as WO 2010/028347 on Mar. 11, 2010; International PCT Application, PCT/US2011/066747, filed Dec. 22, 2011, published as WO 2012/088381 on Jun. 28, 2012; U.S. Pat. No. 9,023,594, issued May 5, 2015; U.S. Pat. No. 9,771,574, issued Sep. 26, 2017; U.S. Pat. No. 9,394,537, issued Jul. 19, 2016; International PCT Application, PCT/US2015/012022, filed Jan. 20, 2015, published as WO 2015/134121 on Sep. 11, 2015; U.S. Pat. No. 10,179,911, issued Jan. 15, 2019; International Application No. PCT/US2019/37216, published as WO 2019/241649 on Dec. 19, 2019, International Patent Publication WO 2019/023680, published Jan. 31, 2019, International PCT Application, PCT/US2016/027795, filed Apr. 15, 2016, published as WO 2016/168631 on Oct. 20, 2016, and International Publication No. WO 2020/041751, published on Feb. 27, 2020, each of which are incorporated herein by reference.

[0460] Methods and strategies to design conditional promoters suitable for carrying out the selection strategies described herein are well known to those of skill in the art. For an overview over exemplary suitable selection strategies and methods for designing conditional promoters driving the expression of a gene required for cell-cell gene transfer, e.g., gene III (gIII), see Vidal and Legrain, Yeast n-hybrid review, Nucleic Acid Res. 27, 919 (1999), incorporated herein in its entirety.

[0461] The disclosure provides vectors for the continuous evolution processes. In some embodiments, phage vectors for phage-assisted continuous evolution are provided. In some embodiments, a selection phage is provided that comprises a phage genome deficient in at least one gene required for the generation of infectious phage particles and a gene of interest to be evolved. Reference is made to International Patent Publication WO 2019/023680, published Jan. 31, 2019, herein incorporated by reference.

[0462] For example, in some embodiments, the selection phage comprises an M13 phage genome deficient in a gene required for the generation of infectious M13 phage particles, for example, a full-length gIII. In some embodiments, the selection phage comprises a phage genome providing all other phage functions required for the phage life cycle except the gene required for generation of infectious phage particles. In some such embodiments, an M13 selection phage is provided that comprises a gI, gII, gIV, gV, gVI, gVII, gVIII, gIX, and a gX gene, but not a full-length gIII. In some embodiments, the selection phage comprises a 3′-fragment of gIII, but no full-length gIII. The 3′-end of gIII comprises a promoter and retaining this promoter activity is beneficial, in some embodiments, for an increased expression of gVI, which is immediately downstream of the gIII 3′-promoter, or a more balanced (wild-type phage-like) ratio of expression levels of the phage genes in the host cell, which, in turn, can lead to more efficient phage production. In some embodiments, the 3′-fragment of gIII gene comprises the 3′-gIII promoter sequence. In some embodiments, the 3′-fragment of gIII comprises the last 180 bp, the last 150 bp, the last 125 bp, the last 100 bp, the last 50 bp, or the last 25 bp of gIII. In some embodiments, the 3′-fragment of gIII comprises the last 180 bp of gIII.

[0463] M13 selection phage is provided that comprises a gene of interest in the phage genome, for example, inserted downstream of the gVIII 3′-terminator and upstream of the gIII-3′-promoter. In some embodiments, an M13 selection phage is provided that comprises a multiple cloning site for cloning a gene of interest into the phage genome, for example, a multiple cloning site (MCS) inserted downstream of the gVIII 3′-terminator and upstream of the gIII-3′-promoter.

[0464] Some embodiments of this disclosure provide a vector system for continuous evolution procedures, comprising of a viral vector, for example, a selection phage, and a matching accessory plasmid. In some embodiments, a vector system for phage-based continuous directed evolution is provided that comprises (a) a selection phage comprising a gene of interest to be evolved, wherein the phage genome is deficient in a gene required to generate infectious phage; and (b) an accessory plasmid comprising the gene required to generate infectious phage particle under the control of a conditional promoter, wherein the conditional promoter is activated by a function of a gene product encoded by the gene of interest.

[0465] In some embodiments, the selection phage is an M13 phage as described herein. For example, in some embodiments, the selection phage comprises an M13 genome including all genes required for the generation of phage particles, for example, gI, gII, gIV, gV, gVI, gVII, gVIII, gIX, and gX gene, but not a full-length gIII gene. In some embodiments, the selection phage genome comprises an F1 or an M13 origin of replication. In some embodiments, the selection phage genome comprises a 3′-fragment of gIII gene. In some embodiments, the selection phage comprises a multiple cloning site upstream of the gIII 3′-promoter and downstream of the gVIII 3′-terminator.

[0466] In an exemplary PACE methodology, host cells each containing a mutagenesis plasmid are diluted into 5 mL Davis Rich Medium (DRM) with appropriate antibiotics and grown to an A600 of 0.4-0.8. Cells are then used to inoculate a chemostat (60 mL), which may be maintained under continuous dilution with fresh DRM at 1-1.5 volumes per hour to keep cell density roughly constant. Lagoons are initially filled with DRM, then continuously diluted with chemostat culture for at least 2 hours before seeding with phage. A stock solution of arabinose (1 M) may be pumped directly into lagoons (10 mM final) as previously described³⁹ for 1 hour before the addition of selection phage (SP). For the first 12 hours after phage inoculation, anhydrotetracycline is present in the stock solution (3.3 μg/mL). Lagoons may be seeded at a starting titer of ˜10⁷ pfu per mL. Dilution rate may be adjusted by modulating lagoon volume (5-20 mL) and/or culture inflow rate (10-20 mL/h). Lagoons may be sampled every 24 hours by removal of culture (500 μL) by syringe. Samples are centrifuged at 13,500 g for 2 minutes and the supernatant removed and stored at 4° C. Titers are evaluated by plaquing. The presence of T7 RNAP or gene III recombinant phage is monitored by plaquing on S2060 cells containing pT7-AP and no plasmid. Phage genotypes may be assessed from single plaques by diagnostic PCR.

[0467] Some embodiments of this disclosure provide a method of non-continuous evolution of a gene of interest. In certain embodiments, the method of non-continuous evolution is PANCE. In other embodiments, the method of non-continuous evolution is an antibiotic or plate-based selection method. PANCE uses the same genetic circuit as PACE to activate phage propagation, but instead of continuously diluting a vessel, phage are manually passaged by infecting fresh host-cell culture with an aliquot from the proceeding passage. PANCE is less stringent than PACE because there is little risk of losing a weakly active phage variant during selection, and because the effective rate of phage dilution is much lower.

[0468] An exemplary PANCE methododology comprises first growing the host strain containing a mutagenesis plasmid of E. coli on 2×YT agar containing 0.5% glucose (w/v) along with appropriate concentrations of antibiotics until optical density reaches A600=0.5-0.6 in a large volume. The cells are re-transformed with the mutagenesis plasmid regularly to ensure the plasmid has not been inactivated. An aliquot of a desired concentration, often 2 mL, is then transferred to a smaller flask, supplemented with 40 mM inducing agent arabinose (Ara) for the mutagenesis plasmid, and infected with the selection phage (SP). To increase the titer level, a drift plasmid may also be provided that enables phage to propagate without passing the selection. Expression is under the control of an inducible promoter and can be turned on with 0-40 ng/mL of anhydrotetracycline. Treated cultures may be split into the desired number of either 2 mL cultures in single culture tubes or 500 μL cultures in a 96-well plate and infected with selection phage (see FIG. 19). These cultures may be incubated at 37° C. for 8-12 h to facilitate phage growth, which is confirmed by determination of the phage titer, and then harvested. Following phage growth, an aliquot of infected cells is used to transfect a subsequent flask containing host E. coli. Supernatant containing evolved phage may isolated and stored at 4° C. This process may be continued until the desired phenotype is evolved for as many transfers as required, while increasing the stringency in stepwise fashion by decreasing the incubation time or titer of phage with which the bacteria is infected. In an exemplary PANCE protocol as provided herein, the process is iterated in 25 culture passages. Reference is made to Suzuki T. et al., Crystal structures reveal an elusive functional domain of pyrrolysyl-tRNA synthetase, Nat Chem Biol. 13(12): 1261-1266 (2017), incorporated herein in its entirety.

[0469] In some embodiments, negative selection is applied during a non-continuous evolution method as described herein, by penalizing undesired activities. In some embodiments, this is achieved by causing the undesired activity to interfere with pIII production. For example, expression of an antisense RNA complementary to the gIII RBS and/or start codon is one way of applying negative selection, while expressing a protease (e.g., TEV) and engineering the protease recognition sites into pIII is another.

[0470] Other non-continuous selection schemes for gene products having a desired activity are well known to those of skill in the art or will be apparent from the present disclosure. In certain embodiments, following the successful directed evolution of one or more components of the adenine base editor (e.g., a Cas9 domain or a adenosine deaminase domain), methods of making the base editors comprise recombinant protein expression methodologies known to one of ordinary skill in the art.

### Vectors

[0471] Several aspects of the making and using the base editors of the disclosure relate to vector systems comprising one or more vectors encoding the adenine base editors. Vectors may be designed to clone and/or express the adenine base editors of the disclosure. Vectors may also be designed to transfect the adenine base editors of the disclosure into one or more cells, e.g., a target diseased eukaryotic cell for treatment with the base editor systems and methods disclosed herein.

[0472] Vectors may be designed for expression of base editor transcripts (e.g. nucleic acid transcripts, proteins, or enzymes) in prokaryotic or eukaryotic cells. For example, base editor transcripts may be expressed in bacterial cells such as Escherichia coli, insect cells (using baculovirus expression vectors), yeast cells, plant cells, or mammalian cells. Suitable host cells are discussed further in Goeddel, Gene Expression Technology: Methods In Enzymology 185, Academic Press. San Diego, Calif. (1990). Alternatively, expression vectors encoding one or more adenine base editors described herein may be transcribed and translated in vitro, for example using T7 promoter regulatory sequences and T7 polymerase. Vectors encoding the adenine base editors provided herein may comprise any of the DNA plasmids identified with the “A-to-G base editor” purpose provided at the Addgene webpage, https://www.addgene.org/browse/article/28207557/. Exemplary vectors include the ABE8e, SaABE8e, SaKKH-ABE8e, CP1028-ABE8e, and NG-ABE8e vectors.

[0473] Vectors may be introduced and propagated in a prokaryotic cells. In some embodiments, a prokaryote is used to amplify copies of a vector to be introduced into a eukaryotic cell or as an intermediate vector in the production of a vector to be introduced into a eukaryotic cell (e.g. amplifying a plasmid as part of a viral vector packaging system). In some embodiments, a prokaryote is used to amplify copies of a vector and express one or more nucleic acids, such as to provide a source of one or more proteins for delivery to a host cell or host organism. Expression of proteins in prokaryotes is most often carried out in Escherichia coli with vectors containing constitutive or inducible promoters directing the expression of either fusion or non-base editors.

[0474] Fusion expression vectors also may be used to express the adenine base editors of the disclosure. Such vectors generally add a number of amino acids to a protein encoded therein, such as to the amino terminus of the recombinant protein. Such fusion vectors may serve one or more purposes, such as: (i) to increase expression of recombinant protein; (ii) to increase the solubility of the recombinant protein; and (iii) to aid in the purification of the recombinant protein by acting as a ligand in affinity purification. Often, in fusion expression vectors, a proteolytic cleavage site is introduced at the junction of the fusion moiety and the recombinant protein to enable separation of the recombinant protein from the fusion moiety subsequent to purification of the base editor. Such enzymes, and their cognate recognition sequences, include Factor Xa, thrombin and enterokinase. Example fusion expression vectors include pGEX (Pharmacia Biotech Inc; Smith and Johnson, 1988. Gene 67: 31-40), pMAL (New England Biolabs, Beverly, Mass.) and pRIT5 (Pharmacia, Piscataway, N.J.) that fuse glutathione S-transferase (GST), maltose E binding protein, or protein A, respectively, to the target recombinant protein.

[0475] Examples of suitable inducible non-fusion E. coli expression vectors include pTrc (Amrann et al., (1988) Gene 69:301-315) and pET 11d (Studier et al., GENE EXPRESSION TECHNOLOGY: METHODS IN ENZYMOLOGY 185, Academic Press, San Diego, Calif. (1990) 60-89).

[0476] In some embodiments, a vector drives protein expression in insect cells using baculovirus expression vectors. Baculovirus vectors available for expression of proteins in cultured insect cells (e.g., SF9 cells) include the pAc series (Smith, et al., 1983. Mol. Cell. Biol. 3: 2156-2165) and the pVL series (Lucklow and Summers, 1989. Virology 170: 31-39).

[0477] In some embodiments, a vector is capable of driving expression of one or more sequences in mammalian cells using a mammalian expression vector. Examples of mammalian expression vectors include pCDM8 (Seed, 1987. Nature 329: 840) and pMT2PC (Kaufman, et al., 1987. EMBO J. 6: 187-195). When used in mammalian cells, the expression vector's control functions are typically provided by one or more regulatory elements. For example, commonly used promoters are derived from polyoma, adenovirus 2, cytomegalovirus, simian virus 40, and others disclosed herein and known in the art. For other suitable expression systems for both prokaryotic and eukaryotic cells see, e.g., Chapters 16 and 17 of Sambrook, et al., MOLECULAR CLONING: A LABORATORY MANUAL. 2nd ed., Cold Spring Harbor Laboratory, Cold Spring Harbor Laboratory Press, Cold Spring Harbor, N.Y., 1989.

[0478] In some embodiments, the recombinant mammalian expression vector is capable of directing expression of the nucleic acid preferentially in a particular cell type (e.g., tissue-specific regulatory elements are used to express the nucleic acid). Tissue-specific regulatory elements are known in the art. Non-limiting examples of suitable tissue-specific promoters include the albumin promoter (liver-specific; Pinkert, et al., 1987. Genes Dev. 1: 268-277), lymphoid-specific promoters (Calame and Eaton, 1988. Adv. Immunol. 43: 235-275), in particular promoters of T cell receptors (Winoto and Baltimore, 1989. EMBO J. 8: 729-733) and immunoglobulins (Baneiji, et al., 1983. Cell 33: 729-740; Queen and Baltimore, 1983. Cell 33: 741-748), neuron-specific promoters (e.g., the neurofilament promoter; Byrne and Ruddle, 1989. Proc. Natl. Acad. Sci. USA 86: 5473-5477), pancreas-specific promoters (Edlund, et al., 1985. Science 230: 912-916), and mammary gland-specific promoters (e.g., milk whey promoter, U.S. Pat. No. 4,873,316 and European Application Publication No. 264,166). Developmentally-regulated promoters are also encompassed, e.g., the murine hox promoters (Kessel and Gruss, 1990. Science 249: 374-379) and the α-fetoprotein promoter (Campes and Tilghman, 1989. Genes Dev. 3: 537-546).

### Eukaryotic Cell Systems for Determining Off-Target Effects of Base Editors

[0479] In some aspects, eukaryotic cell assays and systems for measuring off-target effects (e.g., off-target editing frequencies) of an adenine base editor are provided. These systems may be used in accordance with the disclosed methods. These systems are referred to in the Examples as an “orthogonal R-loop assay.” Systems for determining the off-target editing frequency of a base editor may comprise one or more eukaryotic cells each comprising i) a first nucleic acid molecule encoding a base editor comprising a napDNAbp domain; (ii) a second nucleic acid molecule encoding a first guide RNA that is engineered to bind to the napDNAbp domain of the base editor, wherein the first guide RNA comprises a first sequence of at least 10 contiguous nucleotides that is complementary to a target sequence; (iii) a third nucleic acid molecule encoding a nuclease inactive napDNAbp protein; and (iv) a fourth nucleic acid molecule encoding a second gRNA that is engineered to bind to the nuclease inactive napDNAbp protein, wherein the second guide RNA comprises a second sequence of at least 10 contiguous nucleotides that is complementary to a third sequence, whereby the first complex and second complex generate two or more R-loops, and wherein the third sequence has about 60% or less sequence identity to the target sequence. Exemplary eukaryotic cell assays and systems for measuring off-target effects of the disclosed adenine base editors are disclosed in and International Application No. PCT/US2020/062428, filed Nov. 25, 2020, incorporate herein by reference.

[0480] The disclosed systems may further comprise a third, fourth, fifth, and/or sixth complex, wherein each of the third, fourth, fifth, and/or sixth complexes comprises (v) a second nuclease inactive napDNAbp protein, and (vi) a third guide RNA that is engineered to bind to the second nuclease inactive napDNAbp protein, wherein the third guide RNA comprises a fourth sequence of at least 10 contiguous nucleotides that is complementary to the third sequence. These complexes may be identical or essentially identical to each other, in that they are associated with identical or nearly identical gRNAs that have complementarity to the same off-target sequence. Any one of these complexes may be distinct or essentially identical to the second complex. The second and third guide RNA may share at least 95%, 98%, 98.5%, or 100% sequence identity, e.g., in the backbone of the guide RNA sequence. In certain embodiments, the second and third guide RNA share 100% identity or are the same. Likewise, the first nuclease inactive napDNAbp protein and the second nuclease inactive napDNAbp may be the same.

[0481] In some embodiments, any of the nuclease inactive napDNAbp proteins of the described systems may be a dead Cas9 (dCas9) protein. Accordingly, in some embodiments, the second complex comprises a first dCas9 protein, and the third and subsequent complexes comprise a second dCas9 protein. In some embodiments, the nuclease inactive napDNAbp protein of any of the described complexes is a dead Cas9 protein from S. aureus. In some embodiments, the nuclease inactive napDNAbp protein is a dead Cas9 protein from S. pyogenes.

[0482] In some embodiments, the eukaryotic cells of the disclosed systems comprise mammalian cells. The eukaryotic cells may comprise human cells, e.g. HEK293T cells.

[0483] In some embodiments of these methods, transformed eukaryotic cells are sequenced to validate that mutations arise from adenine-to-guanine conversions. This sequencing step may be achieved by Sanger sequencing, high-throughput sequencing, whole genome sequencing, and/or other sequencing methods known in the art.

[0484] The on-target and Cas9-independent off-target editing rates of various base editors, such as ABEs, may be compared by transforming any one of the disclosed eukaryotic cell systems with plasmids encoding these base editors in parallel, and evaluating the deamination rates at on-target and off-target sites for each base editor.

### Methods of Editing A Target Nucleobase Pair, Methods of Treatment, and Uses of the Adenine Base Editors

[0485] Some aspects of the disclosure provide methods for editing a nucleic acid (e.g., a base pair of a double-stranded DNA sequence). In some embodiments, the method comprises the steps of: a) contacting a target region of a nucleic acid (e.g., a double-stranded DNA sequence) with a complex comprising a base editor (e.g., a Cas9 domain fused to an adenosine deaminase domain) and a guide nucleic acid (e.g., gRNA), wherein the target region comprises a targeted nucleobase pair. As a result of embodiments of these methods, strand separation of said target region is induced, a first nucleobase of said target nucleobase pair in a single strand of the target region is converted to a second nucleobase, and no more than one strand of said target region is cut (or nicked), wherein a third nucleobase complementary to the first nucleobase base is replaced by a fourth nucleobase complementary to the second nucleobase.

[0486] In some embodiments, the first nucleobase is an adenine. In some embodiments, the second nucleobase is a deaminated adenine, or hypoxanthine. In some embodiments, the third nucleobase is a thymine. In some embodiments, the fourth nucleobase is a cytosine. In some embodiments, the method further comprises replacing the second nucleobase with a fifth nucleobase that is complementary to the fourth nucleobase, thereby generating an intended edited base pair (e.g., A:T to G:C). In some embodiments, the fifth nucleobase is a guanine. In some embodiments, at least 5% of the intended base pairs are edited. In some embodiments, at least 10%, 15%, 20%, 25%, 30%, 35%, 40%, 45%, or 50% of the intended base pairs are edited.

[0487] In some embodiments, the cut single strand (nicked strand) is hybridized to the guide nucleic acid. In some embodiments, the cut single strand is opposite to the strand comprising the first nucleobase. In some embodiments, the base editor comprises a Cas9 domain. In some embodiments, the first base is adenine, and the second base is not a G, C, A, or T. In some embodiments, the second base is hypoxanthine. In some embodiments, the first base is adenine. In some embodiments, the second base is not a G, C, A, or T. In some embodiments, the second base is hypoxanthine. In some embodiments, the base editor inhibits base excision repair of the edited strand. In some embodiments, the base editor protects or binds the non-edited strand. In some embodiments, the base editor comprises a catalytically inactive hypoxanthine-specific nuclease. In some embodiments, the base editor comprises nickase activity. In some embodiments, the intended edited base pair is upstream of a PAM site.

[0488] In some embodiments, the intended edited base pair is 1, 2, 3, 4, 5, 6, 7, 8, 9, 10, 11, 12, 13, 14, 15, 16, 17, 18, 19, or 20 nucleotides upstream of the PAM site. In some embodiments, the intended edited basepair is downstream of a PAM site. In some embodiments, the intended edited base pair is 1, 2, 3, 4, 5, 6, 7, 8, 9, 10, 11, 12, 13, 14, 15, 16, 17, 18, 19, or 20 nucleotides downstream stream of the PAM site. In some embodiments, the method does not require a canonical (e.g., NGG) PAM site. In some embodiments, the base editor comprises a linker. In some embodiments, the linker is 1-25 amino acids in length. In some embodiments, the linker is 5-20 amino acids in length. In some embodiments, linker is 10, 11, 12, 13, 14, 15, 16, 17, 18, 19, or 20 amino acids in length. In some embodiments, the target region comprises a target window, wherein the target window comprises the target nucleobase pair. In some embodiments, the target window comprises 1-10 nucleotides. In some embodiments, the target window is 1-9, 1-8, 1-7, 1-6, 1-5, 1-4, 1-3, 1-2, or 1 nucleotides in length. In some embodiments, the target window is 1, 2, 3, 4, 5, 6, 7, 8, 9, 10, 11, 12, 13, 14, 15, 16, 17, 18, 19, or 20 nucleotides in length. In some embodiments, the intended edited base pair is within the target window. In some embodiments, the target window comprises the intended edited base pair. In some embodiments, the method is performed using any of the adenine base editors provided herein. In some embodiments, a target window is a deamination window.

[0489] In some aspects, the disclosure provides improved adenine base editors with expanded target windows. In some embodiments, the target window of the disclosed base editors corresponds to protospacer positions 4-8 of the target sequence, wherein protospacer position 0 corresponds to the position of the first contiguous nucleotide of the guide RNA sequence that is complementary to the target sequence, or to the position of the transcription start site of the target gene. Protospacer position 0 may also refer to the nucleotide position most distal from the PAM. In other embodiments of the disclosed base editors, the base editors have an expanded target window that corresponds to protospacer positions 3-14 of the target sequence relative to the position of the transcription start site of the target gene. In other embodiments, the target window corresponds to protospacer positions 4-11. In still other embodiments, the target window corresponds to protospacer positions 8-14. In still other embodiments, the target window corresponds to protospacer positions 9-14. (See FIG. 2G.) In some embodiments, the target window is in a gene (e.g. HBG, HBB, or BC11A). In some embodiments, the base editors with wider target windows comprise CP1028-ABE8e (set forth in SEQ ID NO: 183). In some embodiments, the base editors with wider target windows comprise CP1041-ABE8e (SEQ ID NO: 185).

[0490] In some embodiments, the method comprises a) contacting a target region of the double-stranded DNA sequence with a complex comprising a base editor and a guide nucleic acid (e.g., gRNA), where the target region comprises a target nucleobase pair, and thereby inducing strand separation of said target region, converting a first nucleobase of said target nucleobase pair in a single strand of the target region to a second nucleobase, cutting no more than one strand of said target region, wherein a third nucleobase complementary to the first nucleobase base is replaced by a fourth nucleobase complementary to the second nucleobase, and the second nucleobase is replaced with a fifth nucleobase that is complementary to the fourth nucleobase, and thereby generating an intended edited base pair, wherein the efficiency of generating the intended edited base pair is at least 5%. In some embodiments, at least 5% of the intended base pairs are edited. In some embodiments, at least 10%, 15%, 20%, 25%, 30%, 35%, 40%, 45%, or 50% of the intended base pairs are edited. In some embodiments, the ratio of intended product to unintended products at the target nucleotide is at least 2:1, 5:1, 10:1, 20:1, 30:1, 40:1, 50:1, 60:1, 70:1, 80:1, 90:1, 100:1, or 200:1, or more. In some embodiments, the cut single strand is hybridized to the guide nucleic acid. In some embodiments, the cut single strand is opposite to the strand comprising the first nucleobase. In some embodiments, the first base is adenine. In some embodiments, the second nucleobase is not G, C, A, or T. In some embodiments, the second base is hypoxanthine. In some embodiments, the base editor inhibits base excision repair of the edited strand.

[0491] In other embodiments, the disclosure provides editing methods comprising contacting a DNA, or RNA molecule with any of the adenine base editors provided herein, and with at least one guide nucleic acid (e.g., guide RNA), wherein the guide nucleic acid, (e.g., guide RNA) is about 15-100 nucleotides long and comprises a sequence of at least 10 contiguous nucleotides that is complementary to a target sequence. In some embodiments, the 3′ end of the target sequence is immediately adjacent to a canonical PAM sequence (NGG). In some embodiments, the 3′ end of the target sequence is not immediately adjacent to a canonical PAM sequence (NGG). In some embodiments, the 3′ end of the target sequence is immediately adjacent to an AGC, GAG, TTT, GTG, or CAA sequence. In some embodiments, the 3′ end of the target sequence is immediately adjacent to a non-canonical PAM sequence (e.g., NGN).

[0492] In some embodiments, the target DNA sequence comprises a sequence associated with a disease or disorder. In some embodiments, the target DNA sequence comprises a point mutation associated with a disease or disorder. In some embodiments, the activity of the base editor (e.g., comprising an adenosine deaminase and a Cas9 domain), or the complex, results in a correction of the point mutation. In some embodiments, the target DNA sequence comprises a G→A point mutation associated with a disease or disorder, and wherein the deamination of the mutant A base results in a sequence that is not associated with a disease or disorder. In some embodiments, the target DNA sequence encodes a protein, and the point mutation is in a codon and results in a change in the amino acid encoded by the mutant codon as compared to the wild-type codon. In some embodiments, the deamination of the mutant A results in a change of the amino acid encoded by the mutant codon. In some embodiments, the deamination of the mutant A results in the codon encoding the wild-type amino acid. In some embodiments, the contacting is in vivo in a subject. In some embodiments, the subject has or has been diagnosed with a disease or disorder. Multiplexed Base Editing Applications

[0493] In some aspects, the present disclosure provides methods of editing two or more nucleic acid target sites using the disclosed adenine base editors simultaneously. In multiplexed base editing of unique genomic loci, a plurality of gRNAs having complementarity to different target sequences enables the formation of base editor-gRNA complexes at each of several (e.g. 5, 10, 15, 20, 25, or more) target sequences simulataneously, or within a single iteration or cycle.

[0494] The discovery and widespread implementation of the CRISPR/Cas system has dramatically expanded the toolbox for genome engineering and has revolutionized the future prospects of basic biological research, data storage in living systems, agricultural science, and medicine. An advantage of CRISPR/Cas-based genome editors over prior approaches is the capacity to multiplex by using several guide RNAs (gRNAs). This not only enables the screening of libraries of guides in a single cell population but also the targeting of up to six unique loci at once. However, the editing efficiency at each site tends to decrease when compared to that of a single guide transfection.

[0495] The present disclosure provides for methods of base editing comprising: contacting a nucleic acid molecule (e.g. DNA) with a plurality of complexes, wherein each complex comprises a base editor and a guide RNA (gRNA) bound to the napDNAbp domain of the base editor, wherein at least two of the complexes of the plurality each comprise a unique gRNA comprising a guide sequence of at least 10 contiguous nucleotides that is complementary to a unique target sequence in the genomic DNA of a cell. In certain embodiments, the cell is a eukaryotic cell, e.g. a mammalian cell. In certain embodiments, the cell is a human cell. In certain embodiments, the plurality of the disclosed base editor-gRNA complexes make simultaneous edits (i.e., within a single iteration) at various target loci within a eukaryotic cell, e.g. a mammalian cell.

[0496] In some embodiments, any of the target sequences of these multiplexed editing methods comprises a genomic locus. In some embodiments, the multiple target sequences comprise unique genomic loci. In some embodiments, at least one of the target sequences comprises a sequence in an HBG promoter or the BCL11A enhancer. In some embodiments, at least one of the target sequences comprises a sequence in the HBB gene.

[0497] In some embodiments, at least three, at least four, or at least five of the complexes of the plurality each comprise a unique gRNA comprising a guide sequence of at least 10 contiguous nucleotides that is complementary to a unique target sequence in the genomic DNA of a cell, e.g. a eukaryotic cell.

[0498] In some embodiments, the base editing (deamination) efficiency at each unique target sequence is substantially equivalent to that of a single guide transfection at each of these sequences. In certain embodiments, the step of contacting results in an average base editing efficiency of at least 20%, 22%, 24%, 26%, 28%, 30%, 40%, or 50% across the aggregate of all unique target sequences. In some embodiments, the step of contacting results in an average efficiency of about 24%. In some embodiments, this average efficiency of about 24% is substantially equivalent to that of a single guide transfection at each of these sequences.

[0499] Any of the base editor-gRNA complexes provided herein may be introduced into the cell for multiplexed base editing in any suitable way, either stably or transiently. In some embodiments, a base editor may be transfected into the cell. In some embodiments, the cell may be transduced or transfected with a nucleic acid construct that encodes the base editor. For example, a cell may be transduced (e.g. with a virus encoding a base editor) or transfected (e.g. with a plasmid encoding a base editor) with a nucleic acid that encodes the base editor. Alternatively, a cell may be introduced with the base editor itself. Such transduction may be a stable or transient transduction. In some embodiments, cells expressing a base editing base editor, or comprising a base editor, may be transduced or transfected with one or more gRNA molecules, for example, when the base editor comprises a Cas9 (e.g., nCas9) domain. In some embodiments, a plasmid expressing a base editor may be introduced into cells through electroporation (e.g., using an ATX MaxCyte electroporator), transient transfection (e.g. lipofection) or stable genome integration (e.g., piggybac), viral transduction, or other methods known to those of skill in the art.

[0500] In certain embodiments of the disclosed methods, the constructs that encode the base editors are transfected into the cell separately from the constructs that encode the gRNAs. In certain embodiments, these components are encoded on a single construct and transfected together. In particular embodiments, these single constructs encoding the base editors and gRNAs may be transfected into the cell iteratively, with each iteration associated with a subset of target sequences. In particular embodiments, these single constructs may be transfected into the cell over a period of days. In other embodiments, they may be transfected into the cell over a period of hours. In other embodiments, they may be transected into the cell over a period of weeks.

[0501] In the disclosed methods, target cells may be incubated with the base editor-gRNA complexes for two days, or 48 hours, after transfection to achieve multiplexed base editing. Target cells may be incubated for 30 hours, 40 hours, 54 hours, 60 hours, or 72 hours after transfection. Target cells may be incubated with the base editor-gRNA complexes for four days, five days, seven days, nine days, eleven days, or thirteen days or more after transfection.

[0502] In some aspects, the disclosure provides pharmaceutical compositions comprising a plurality of any of the base editors described herein and a gRNA, wherein at least five of the base editors of the plurality are each bound to a unique gRNA, and a pharmaceutically acceptable excipient.

### Methods of Treatment

[0503] The present disclosure provides methods for the treatment of a subject diagnosed with a disease associated with or caused by a point mutation that may be corrected by a DNA editing base editor provided herein. For example, in some embodiments, a method is provided that comprises administering to a subject having such a disease, e.g., a cancer associated with a point mutation as described above, an effective amount of an adenosine deaminase base editor that corrects the point mutation or introduces a deactivating mutation into a disease-associated gene. In some embodiments, the disease is a proliferative disease. In some embodiments, the disease is a genetic disease. In some embodiments, the disease is a neoplastic disease. In some embodiments, the disease is a metabolic disease. In some embodiments, the disease is a lysosomal storage disease. Other diseases that may be treated by correcting a point mutation or introducing a deactivating mutation into a disease-associated gene will be known to those of skill in the art, and the disclosure is not limited in this respect.

[0504] In some embodiments, the deamination of the mutant A results in the codon encoding the wild-type amino acid. In some embodiments, the contacting is in vivo in a subject. In some embodiments, the subject has or has been diagnosed with a disease or disorder. In some embodiments, the disease or disorder is a hemoglobinopathy. In some embodiments, the disease or disorder is sickle cell disease. In some embodiments, the disease or disorder is β-thalassemia. In some embodiments, the disease or disorder is Glycogen storage disease type 1A, which is associated with a R83C mutation in the Glucose-6-phosphatase-alpha (G6PC) enzyme, and Stargardt macular dystrophy, which is associated with a G1961E mutation in the ATP-binding cassette, sub-family A, member 4 (ABCA4) protein. A list of additional exemplary diseases and disorders that may be treated using the base editors described herein is shown in Table 4. In some embodiments, the disease or disorder is phenylketonuria, von Willebrand disease (vWD), a neoplastic disease associated with a mutant PTEN or BRCA1, or Li-Fraumeni syndrome. Table 4 includes the target gene, the mutation to be corrected, the related disease and the nucleotide sequence of the associated protospacer and PAM.

TABLE 4
List of exemplary diseases that may be treated using the base editors described herein.

| | | ATCC Cell | | |
|---|---|---|---|---|
| Target Gene | Mutation | Line | Disease | Protospacer and PAM |
| PTEN | Cys136Tyr | HTP-20 | Cancer Predisposition | TATATGCATATTTATTACATCGG (SEQ ID NO: 85) |
| PTEN | Arg233Ter | HTB-13 | Cancer Predisposition | CCGTCATGTGGGTCCTGAATTGG (SEQ ID NO: 86) |
| TP53 | Glu258Lys | HTB-65 | Cancer Predisposition | ACACTGAAAGACTCCAGGTCAGG (SEQ ID NO: 87) |
| BRCA1 | Gly1738Arg | NA | Cancer Predisposition | GTCAGAAGAGATGTGGTCAATGG (SEQ ID NO: 88) |
| BRCA1 | 4097-1G > A | NA | Cancer Predisposition | TTTAAAGTGAAGCAGCATCTGGG (SEQ ID NO: 89) |
| | | | | ATTTAAAGTGAAGCAGCATCTGG {SEQ ID NO: 90) |
| PAH | Thr380Mer | NA | Phenylketonuria | ACTCCATGACAGTGTAATTTTGG (SEQ ID NO: 91) |
| VWF | Ser1285Phe | NA | von Willebrand | GCCTGGAGAAGCCATCCAGCAGG (SEQ ID NO: 92) |
| | | | (Hemophilia) | |
| VWF | Arg253STer | NA | von Willebrand | CTCAGACACACTCATTGATGAGG (SEQ ID NO: 93) |
| | | | (Hemophilia) | |
| TP53 | Arg175His | HCC1395 | L1-Fraumeni syndrome | GAGGCACTGCCCCCACCATGAGCG (SEQ ID NO: 94) |

The Adenine to be edited in the protospacer is indicated by underlining and the PAM is indicated in bold.

[0505] Some embodiments provide methods for using the adenine base editors provided herein. In some embodiments, the base editors are used to introduce a point mutation into a nucleic acid by deaminating a target nucleobase, e.g., an A residue. In some embodiments, the deamination of the target nucleobase results in the correction of a genetic defect, e.g., in the correction of a point mutation that leads to a loss of function in a gene product. In some embodiments, the genetic defect is associated with a disease or disorder, e.g., a lysosomal storage disorder or a metabolic disease, such as, for example, type I diabetes. In some embodiments, the methods provided herein are used to introduce a deactivating point mutation into a gene or allele that encodes a gene product that is associated with a disease or disorder. For example, in some embodiments, methods are provided herein that employ a DNA editing base editor to introduce a deactivating point mutation into an oncogene (e.g., in the treatment of a proliferative disease). A deactivating mutation may, in some embodiments, generate a premature stop codon in a coding sequence, which results in the expression of a truncated gene product, e.g., a truncated protein lacking the function of the full-length protein.

[0506] In some embodiments, the purpose of the methods provided herein is to restore the function of a dysfunctional gene via genome editing. The nucleobase editing proteins provided herein can be validated for gene editing-based human therapeutics in vitro, e.g., by correcting a disease-associated mutation in human cell culture. It will be understood by the skilled artisan that the nucleobase editing proteins provided herein, e.g., the base editors comprising a nucleic acid programmable DNA binding protein (e.g., Cas9) and an adenosine deaminase domain may be used to correct any single point G to A or C to T mutation. In the first case, deamination of the mutant A to I corrects the mutation, and in the latter case, deamination of the A that is base-paired with the mutant T, followed by a round of replication, corrects the mutation. Exemplary point mutations that may be corrected are listed in Table 4.

[0507] The successful correction of point mutations in disease-associated genes and alleles opens up new strategies for gene correction with applications in therapeutics and basic research. Site-specific single-base modification systems like the disclosed fusions of a napDNAbp domain and an adenosine deaminase domain also have applications in “reverse” gene therapy, where certain gene functions are purposely suppressed or abolished. In these cases, site-specifically mutating residues that lead to inactivating mutations in a protein, or mutations that inhibit function of the protein may be used to abolish or inhibit protein function. Without wishing to be bound by any particular theory certain anemias, such as sickle cell anemia, may be treated by inducing expression of hemoglobin, such as fetal hemoglobin, which is typically silenced in adults. As one example, mutating −198T to C in the promoter driving HBG1 and HBG2 gene expression results in increased expression of HBG1 and HBG2. As another example, a class of disorders that results from a G to A mutation in a gene is iron storage disorders, where the HFE gene comprises a G to A mutation that results in expression of a C282Y mutant HFE protein, may be treated using any of the adenine base editors provided herein. As another example, a mutation in the HBB gene that causes the sickle cell disease allele, HBB^{S}, may be mutated to a non-pathogenic allele, such as the naturally-occurring Makassar (HBB^{G}) allele using any of the disclosed base editors. As such, correction of the point mutation results in a conversion of an HBB^{S} allele to an HBB^{G} allele.

[0508] The present disclosure provides methods for the treatment of additional diseases or disorders, e.g., diseases or disorders that are associated or caused by a point mutation that may be corrected by deaminase-mediated gene editing. Some such diseases are described herein, and additional suitable diseases that may be treated with the strategies and base editors provided herein will be apparent to those of skill in the art based on the present disclosure. Exemplary suitable diseases and disorders are listed below. Exemplary suitable diseases and disorders include, without limitation: 2-methyl-3-hydroxybutyric aciduria; 3 beta-Hydroxysteroid dehydrogenase deficiency; 3-Methylglutaconic aciduria; 3-Oxo-5 alpha-steroid delta 4-dehydrogenase deficiency; 46,XY sex reversal, type 1, 3, and 5; 5-Oxoprolinase deficiency; 6-pyruvoyl-tetrahydropterin synthase deficiency; Aarskog syndrome; Aase syndrome; Achondrogenesis type 2; Achromatopsia 2 and 7; Acquired long QT syndrome; Acrocallosal syndrome, Schinzel type; Acrocapitofemoral dysplasia; Acrodysostosis 2, with or without hormone resistance; Acroerythrokeratoderma; Acromicric dysplasia; Acth-independent macronodular adrenal hyperplasia 2; Activated PI3K-delta syndrome; Acute intermittent porphyria; deficiency of Acyl-CoA dehydrogenase family, member 9; Adams-Oliver syndrome 5 and 6; Adenine phosphoribosyltransferase deficiency; Adenylate kinase deficiency; hemolytic anemia due to Adenylosuccinate lyase deficiency; Adolescent nephronophthisis; Renal-hepatic-pancreatic dysplasia; Meckel syndrome type 7; Adrenoleukodystrophy; Adult junctional epidermolysis bullosa; Epidermolysis bullosa, junctional, localisata variant; Adult neuronal ceroid lipofuscinosis; Adult neuronal ceroid lipofuscinosis; Adult onset ataxia with oculomotor apraxia; ADULT syndrome; Afibrinogenemia and congenital Afibrinogenemia; autosomal recessive Agammaglobulinemia 2; Age-related macular degeneration 3, 6, 11, and 12; Aicardi Goutieres syndromes 1, 4, and 5; Chilbain lupus 1; Alagille syndromes 1 and 2; Alexander disease; Alkaptonuria; Allan-Herndon-Dudley syndrome; Alopecia universalis congenital; Alpers encephalopathy; Alpha-1-antitrypsin deficiency; autosomal dominant, autosomal recessive, and X-linked recessive Alport syndromes; Alzheimer disease, familial, 3, with spastic paraparesis and apraxia; Alzheimer disease, types, 1, 3, and 4; hypocalcification type and hypomaturation type, IIA1 Amelogenesis imperfecta; Aminoacylase 1 deficiency; Amish infantile epilepsy syndrome; Amyloidogenic transthyretin amyloidosis; Amyloid Cardiomyopathy, Transthyretin-related; Cardiomyopathy; Amyotrophic lateral sclerosis types 1, 6, 15 (with or without frontotemporal dementia), 22 (with or without frontotemporal dementia), and 10; Frontotemporal dementia with TDP43 inclusions, TARDBP-related; Andermann syndrome; Andersen Tawil syndrome; Congenital long QT syndrome; Anemia, nonspherocytic hemolytic, due to G6PD deficiency; Angelman syndrome; Severe neonatal-onset encephalopathy with microcephaly; susceptibility to Autism, X-linked 3; Angiopathy, hereditary, with nephropathy, aneurysms, and muscle cramps; Angiotensin i-converting enzyme, benign serum increase; Aniridia, cerebellar ataxia, and mental retardation; Anonychia; Antithrombin III deficiency; Antley-Bixler syndrome with genital anomalies and disordered steroidogenesis; Aortic aneurysm, familial thoracic 4, 6, and 9; Thoracic aortic aneurysms and aortic dissections; Multisystemic smooth muscle dysfunction syndrome; Moyamoya disease 5; Aplastic anemia; Apparent mineralocorticoid excess; Arginase deficiency; Argininosuccinate lyase deficiency; Aromatase deficiency; Arrhythmogenic right ventricular cardiomyopathy types 5, 8, and 10; Primary familial hypertrophic cardiomyopathy; Arthrogryposis multiplex congenita, distal, X-linked; Arthrogryposis renal dysfunction cholestasis syndrome; Arthrogryposis, renal dysfunction, and cholestasis 2; Asparagine synthetase deficiency; Abnormality of neuronal migration; Ataxia with vitamin E deficiency; Ataxia, sensory, autosomal dominant; Ataxia-telangiectasia syndrome; Hereditary cancer-predisposing syndrome; Atransferrinemia; Atrial fibrillation, familial, 11, 12, 13, and 16; Atrial septal defects 2, 4, and 7 (with or without atrioventricular conduction defects); Atrial standstill 2; Atrioventricular septal defect 4; Atrophia bulborum hereditaria; ATR-X syndrome; Auriculocondylar syndrome 2; Autoimmune disease, multisystem, infantile-onset; Autoimmune lymphoproliferative syndrome, type 1a; Autosomal dominant hypohidrotic ectodermal dysplasia; Autosomal dominant progressive external ophthalmoplegia with mitochondrial DNA deletions 1 and 3; Autosomal dominant torsion dystonia 4; Autosomal recessive centronuclear myopathy; Autosomal recessive congenital ichthyosis 1, 2, 3, 4A, and 4B; Autosomal recessive cutis laxa type IA and 1B; Autosomal recessive hypohidrotic ectodermal dysplasia syndrome; Ectodermal dysplasia 11b; hypohidrotic/hair/tooth type, autosomal recessive; Autosomal recessive hypophosphatemic bone disease; Axenfeld-Rieger syndrome type 3; Bainbridge-Ropers syndrome; Bannayan-Riley-Ruvalcaba syndrome; PTEN hamartoma tumor syndrome; Baraitser-Winter syndromes 1 and 2; Barakat syndrome; Bardet-Biedl syndromes 1, 11, 16, and 19; Bare lymphocyte syndrome type 2, complementation group E; Bartter syndrome antenatal type 2; Bartter syndrome types 3, 3 with hypocalciuria, and 4; Basal ganglia calcification, idiopathic, 4; Beaded hair; Benign familial hematuria; Benign familial neonatal seizures 1 and 2; Seizures, benign familial neonatal, 1, and/or myokymia; Seizures, Early infantile epileptic encephalopathy 7; Benign familial neonatal-infantile seizures; Benign hereditary chorea; Benign scapuloperoneal muscular dystrophy with cardiomyopathy; Bernard-Soulier syndrome, types A1 and A2 (autosomal dominant); Bestrophinopathy, autosomal recessive; beta Thalassemia; Bethlem myopathy and Bethlem myopathy 2; Bietti crystalline corneoretinal dystrophy; Bile acid synthesis defect, congenital, 2; Biotinidase deficiency; Birk Barel mental retardation dysmorphism syndrome; Blepharophimosis, ptosis, and epicanthus inversus; Bloom syndrome; Borjeson-Forssman-Lehmann syndrome; Boucher Neuhauser syndrome; Brachydactyly types A1 and A2; Brachydactyly with hypertension; Brain small vessel disease with hemorrhage; Branched-chain ketoacid dehydrogenase kinase deficiency; Branchiootic syndromes 2 and 3; Breast cancer, early-onset; Breast-ovarian cancer, familial 1, 2, and 4; Brittle cornea syndrome 2; Brody myopathy; Bronchiectasis with or without elevated sweat chloride 3; Brown-Vialetto-Van laere syndrome and Brown-Vialetto-Van Laere syndrome 2; Brugada syndrome; Brugada syndrome 1; Ventricular fibrillation; Paroxysmal familial ventricular fibrillation; Brugada syndrome and Brugada syndrome 4; Long QT syndrome; Sudden cardiac death; Bull eye macular dystrophy; Stargardt disease 4; Cone-rod dystrophy 12; Bullous ichthyosiform erythroderma; Burn-Mckeown syndrome; Candidiasis, familial, 2, 5, 6, and 8; Carbohydrate-deficient glycoprotein syndrome type I and II; Carbonic anhydrase VA deficiency, hyperammonemia due to; Carcinoma of colon; Cardiac arrhythmia; Long QT syndrome, LQT1 subtype; Cardioencephalomyopathy, fatal infantile, due to cytochrome c oxidase deficiency; Cardiofaciocutaneous syndrome; Cardiomyopathy; Danon disease; Hypertrophic cardiomyopathy; Left ventricular noncompaction cardiomyopathy; Carnevale syndrome; Carney complex, type 1; Carnitine acylcarnitine translocase deficiency; Carnitine palmitoyltransferase I, II, II (late onset), and II (infantile) deficiency; Cataract 1, 4, autosomal dominant, autosomal dominant, multiple types, with microcornea, coppock-like, juvenile, with microcornea and glucosuria, and nuclear diffuse nonprogressive; Catecholaminergic polymorphic ventricular tachycardia; Caudal regression syndrome; Cd8 deficiency, familial; Central core disease; Centromeric instability of chromosomes 1,9 and 16 and immunodeficiency; Cerebellar ataxia infantile with progressive external ophthalmoplegi and Cerebellar ataxia, mental retardation, and dysequilibrium syndrome 2; Cerebral amyloid angiopathy, APP-related; Cerebral autosomal dominant and recessive arteriopathy with subcortical infarcts and leukoencephalopathy; Cerebral cavernous malformations 2; Cerebrooculofacioskeletal syndrome 2; Cerebro-oculo-facio-skeletal syndrome; Cerebroretinal microangiopathy with calcifications and cysts; Ceroid lipofuscinosis neuronal 2, 6, 7, and 10; Ch\xc3\xa9diak-Higashi syndrome, Chediak-Higashi syndrome, adult type; Charcot-Marie-Tooth disease types 1B, 2B2, 2C, 2F, 2I, 2U (axonal), 1C (demyelinating), dominant intermediate C, recessive intermediate A, 2A2, 4C, 4D, 4H, IF, IVF, and X; Scapuloperoneal spinal muscular atrophy; Distal spinal muscular atrophy, congenital nonprogressive; Spinal muscular atrophy, distal, autosomal recessive, 5; CHARGE association; Childhood hypophosphatasia; Adult hypophosphatasia; Cholecystitis; Progressive familial intrahepatic cholestasis 3; Cholestasis, intrahepatic, of pregnancy 3; Cholestanol storage disease; Cholesterol monooxygenase (side-chain cleaving) deficiency; Chondrodysplasia Blomstrand type; Chondrodysplasia punctata 1, X-linked recessive and 2 X-linked dominant; CHOPS syndrome; Chronic granulomatous disease, autosomal recessive cytochrome b-positive, types 1 and 2; Chudley-McCullough syndrome; Ciliary dyskinesia, primary, 7, 11, 15, 20 and 22; Citrullinemia type I; Citrullinemia type I and II; Cleidocranial dysostosis; C-like syndrome; Cockayne syndrome type A, Coenzyme Q10 deficiency, primary 1, 4, and 7; Coffin Siris/Intellectual Disability; Coffin-Lowry syndrome; Cohen syndrome, Cold-induced sweating syndrome 1; COLE-CARPENTER SYNDROME 2; Combined cellular and humoral immune defects with granulomas; Combined d-2- and 1-2-hydroxyglutaric aciduria; Combined malonic and methylmalonic aciduria; Combined oxidative phosphorylation deficiencies 1, 3, 4, 12, 15, and 25; Combined partial and complete 17-alpha-hydroxylase/17,20-lyase deficiency; Common variable immunodeficiency 9; Complement component 4, partial deficiency of, due to dysfunctional c1 inhibitor; Complement factor B deficiency; Cone monochromatism; Cone-rod dystrophy 2 and 6; Cone-rod dystrophy amelogenesis imperfecta; Congenital adrenal hyperplasia and Congenital adrenal hypoplasia, X-linked; Congenital amegakaryocytic thrombocytopenia; Congenital aniridia; Congenital central hypoventilation; Hirschsprung disease 3; Congenital contractural arachnodactyly; Congenital contractures of the limbs and face, hypotonia, and developmental delay; Congenital disorder of glycosylation types 1B, 1D, 1G, 1H, 1J, 1K, 1N, 1P, 2C, 2J, 2K, IIm; Congenital dyserythropoietic anemia, type I and II; Congenital ectodermal dysplasia of face; Congenital erythropoietic porphyria; Congenital generalized lipodystrophy type 2; Congenital heart disease, multiple types, 2; Congenital heart disease; Interrupted aortic arch; Congenital lipomatous overgrowth, vascular malformations, and epidermal nevi; Non-small cell lung cancer; Neoplasm of ovary; Cardiac conduction defect, nonspecific; Congenital microvillous atrophy; Congenital muscular dystrophy; Congenital muscular dystrophy due to partial LAMA2 deficiency; Congenital muscular dystrophy-dystroglycanopathy with brain and eye anomalies, types A2, A7, A8, All, and A14; Congenital muscular dystrophy-dystroglycanopathy with mental retardation, types B2, B3, B5, and B15; Congenital muscular dystrophy-dystroglycanopathy without mental retardation, type B5; Congenital muscular hypertrophy-cerebral syndrome; Congenital myasthenic syndrome, acetazolamide-responsive; Congenital myopathy with fiber type disproportion; Congenital ocular coloboma; Congenital stationary night blindness, type 1A, 1B, 1C, 1E, 1F, and 2A; Coproporphyria; Cornea plana 2; Corneal dystrophy, Fuchs endothelial, 4; Corneal endothelial dystrophy type 2; Corneal fragility keratoglobus, blue sclerae and joint hypermobility; Cornelia de Lange syndromes 1 and 5; Coronary artery disease, autosomal dominant 2; Coronary heart disease; Hyperalphalipoproteinemia 2; Cortical dysplasia, complex, with other brain malformations 5 and 6; Cortical malformations, occipital; Corticosteroid-binding globulin deficiency; Corticosterone methyloxidase type 2 deficiency; Costello syndrome; Cowden syndrome 1; Coxa plana; Craniodiaphyseal dysplasia, autosomal dominant; Craniosynostosis 1 and 4; Craniosynostosis and dental anomalies; Creatine deficiency, X-linked; Crouzon syndrome; Cryptophthalmos syndrome; Cryptorchidism, unilateral or bilateral; Cushing symphalangism; Cutaneous malignant melanoma 1; Cutis laxa with osteodystrophy and with severe pulmonary, gastrointestinal, and urinary abnormalities; Cyanosis, transient neonatal and atypical nephropathic; Cystic fibrosis; Cystinuria; Cytochrome c oxidase i deficiency; Cytochrome-c oxidase deficiency; D-2-hydroxyglutaric aciduria 2; Darier disease, segmental; Deafness with labyrinthine aplasia microtia and microdontia (LAMM); Deafness, autosomal dominant 3a, 4, 12, 13, 15, autosomal dominant nonsyndromic sensorineural 17, 20, and 65; Deafness, autosomal recessive 1A, 2, 3, 6, 8, 9, 12, 15, 16, 18b, 22, 28, 31, 44, 49, 63, 77, 86, and 89; Deafness, cochlear, with myopia and intellectual impairment, without vestibular involvement, autosomal dominant, X-linked 2; Deficiency of 2-methylbutyryl-CoA dehydrogenase; Deficiency of 3-hydroxyacyl-CoA dehydrogenase; Deficiency of alpha-mannosidase; Deficiency of aromatic-L-amino-acid decarboxylase; Deficiency of bisphosphoglycerate mutase; Deficiency of butyryl-CoA dehydrogenase; Deficiency of ferroxidase; Deficiency of galactokinase; Deficiency of guanidinoacetate methyltransferase; Deficiency of hyaluronoglucosaminidase; Deficiency of ribose-5-phosphate isomerase; Deficiency of steroid 11-beta-monooxygenase; Deficiency of UDPglucose-hexose-1-phosphate uridylyltransferase; Deficiency of xanthine oxidase; Dejerine-Sottas disease; Charcot-Marie-Tooth disease, types ID and IVF; Dejerine-Sottas syndrome, autosomal dominant; Dendritic cell, monocyte, B lymphocyte, and natural killer lymphocyte deficiency; Desbuquois dysplasia 2; Desbuquois syndrome; DFNA 2 Nonsyndromic Hearing Loss; Diabetes mellitus and insipidus with optic atrophy and deafness; Diabetes mellitus, type 2, and insulin-dependent, 20; Diamond-Blackfan anemia 1, 5, 8, and 10; Diarrhea 3 (secretory sodium, congenital, syndromic) and 5 (with tufting enteropathy, congenital); Dicarboxylic aminoaciduria; Diffuse palmoplantar keratoderma, Bothnian type; Digitorenocerebral syndrome; Dihydropteridine reductase deficiency; Dilated cardiomyopathy 1A, 1AA, 1C, 1G, 1BB, 1DD, 1FF, 1HH, 1I, 1KK, 1N, 1S, 1Y, and 3B; Left ventricular noncompaction 3; Disordered steroidogenesis due to cytochrome p450 oxidoreductase deficiency; Distal arthrogryposis type 2B; Distal hereditary motor neuronopathy type 2B; Distal myopathy Markesbery-Griggs type; Distal spinal muscular atrophy, X-linked 3; Distichiasis-lymphedema syndrome; Dominant dystrophic epidermolysis bullosa with absence of skin; Dominant hereditary optic atrophy; Donnai Barrow syndrome; Dopamine beta hydroxylase deficiency; Dopamine receptor d2, reduced brain density of; Dowling-degos disease 4; Doyne honeycomb retinal dystrophy; Malattia leventinese; Duane syndrome type 2; Dubin-Johnson syndrome; Duchenne muscular dystrophy; Becker muscular dystrophy; Dysfibrinogenemia; Dyskeratosis congenita autosomal dominant and autosomal dominant, 3; Dyskeratosis congenita, autosomal recessive, 1, 3, 4, and 5; Dyskeratosis congenita X-linked; Dyskinesia, familial, with facial myokymia; Dysplasminogenemia; Dystonia 2 (torsion, autosomal recessive), 3 (torsion, X-linked), 5 (Dopa-responsive type), 10, 12, 16, 25, 26 (Myoclonic); Seizures, benign familial infantile, 2; Early infantile epileptic encephalopathy 2, 4, 7, 9, 10, 11, 13, and 14; Atypical Rett syndrome; Early T cell progenitor acute lymphoblastic leukemia; Ectodermal dysplasia skin fragility syndrome; Ectodermal dysplasia-syndactyly syndrome 1; Ectopia lentis, isolated autosomal recessive and dominant; Ectrodactyly, ectodermal dysplasia, and cleft lip/palate syndrome 3; Ehlers-Danlos syndrome type 7 (autosomal recessive), classic type, type 2 (progeroid), hydroxylysine-deficient, type 4, type 4 variant, and due to tenascin-X deficiency; Eichsfeld type congenital muscular dystrophy; Endocrine-cerebroosteodysplasia; Enhanced s-cone syndrome; Enlarged vestibular aqueduct syndrome; Enterokinase deficiency; Epidermodysplasia verruciformis; Epidermolysa bullosa simplex and limb girdle muscular dystrophy, simplex with mottled pigmentation, simplex with pyloric atresia, simplex, autosomal recessive, and with pyloric atresia; Epidermolytic palmoplantar keratoderma; Familial febrile seizures 8; Epilepsy, childhood absence 2, 12 (idiopathic generalized, susceptibility to) 5 (nocturnal frontal lobe), nocturnal frontal lobe type 1, partial, with variable foci, progressive myoclonic 3, and X-linked, with variable learning disabilities and behavior disorders; Epileptic encephalopathy, childhood-onset, early infantile, 1, 19, 23, 25, 30, and 32; Epiphyseal dysplasia, multiple, with myopia and conductive deafness; Episodic ataxia type 2; Episodic pain syndrome, familial, 3; Epstein syndrome; Fechtner syndrome; Erythropoietic protoporphyria; Estrogen resistance; Exudative vitreoretinopathy 6; Fabry disease and Fabry disease, cardiac variant; Factor H, VII, X, v and factor viii, combined deficiency of 2, xiii, a subunit, deficiency; Familial adenomatous polyposis 1 and 3; Familial amyloid nephropathy with urticaria and deafness; Familial cold urticarial; Familial aplasia of the vermis; Familial benign pemphigus; Familial cancer of breast; Breast cancer, susceptibility to; Osteosarcoma; Pancreatic cancer 3; Familial cardiomyopathy; Familial cold autoinflammatory syndrome 2; Familial colorectal cancer; Familial exudative vitreoretinopathy, X-linked; Familial hemiplegic migraine types 1 and 2; Familial hypercholesterolemia; Familial hypertrophic cardiomyopathy 1, 2, 3, 4, 7, 10, 23 and 24; Familial hypokalemia-hypomagnesemia; Familial hypoplastic, glomerulocystic kidney; Familial infantile myasthenia; Familial juvenile gout; Familial Mediterranean fever and Familial mediterranean fever, autosomal dominant; Familial porencephaly; Familial porphyria cutanea tarda; Familial pulmonary capillary hemangiomatosis; Familial renal glucosuria; Familial renal hypouricemia; Familial restrictive cardiomyopathy 1; Familial type 1 and 3 hyperlipoproteinemia; Fanconi anemia, complementation group E, I, N, and O; Fanconi-Bickel syndrome; Favism, susceptibility to; Febrile seizures, familial, 11; Feingold syndrome 1; Fetal hemoglobin quantitative trait locus 1; FG syndrome and FG syndrome 4; Fibrosis of extraocular muscles, congenital, 1, 2, 3a (with or without extraocular involvement), 3b; Fish-eye disease; Fleck corneal dystrophy; Floating-Harbor syndrome; Focal epilepsy with speech disorder with or without mental retardation; Focal segmental glomerulosclerosis 5; Forebrain defects; Frank Ter Haar syndrome; Borrone Di Rocco Crovato syndrome; Frasier syndrome; Wilms tumor 1; Freeman-Sheldon syndrome; Frontometaphyseal dysplasia land 3; Frontotemporal dementia; Frontotemporal dementia and/or amyotrophic lateral sclerosis 3 and 4; Frontotemporal Dementia Chromosome 3-Linked and Frontotemporal dementia ubiquitin-positive; Fructose-biphosphatase deficiency; Fuhrmann syndrome; Gamma-aminobutyric acid transaminase deficiency; Gamstorp-Wohlfart syndrome; Gaucher disease type 1 and Subacute neuronopathic; Gaze palsy, familial horizontal, with progressive scoliosis; Generalized dominant dystrophic epidermolysis bullosa; Generalized epilepsy with febrile seizures plus 3, type 1, type 2; Epileptic encephalopathy Lennox-Gastaut type; Giant axonal neuropathy; Glanzmann thrombasthenia; Glaucoma 1, open angle, e, F, and G; Glaucoma 3, primary congenital, d; Glaucoma, congenital and Glaucoma, congenital, Coloboma; Glaucoma, primary open angle, juvenile-onset; Glioma susceptibility 1; Glucose transporter type 1 deficiency syndrome; Glucose-6-phosphate transport defect; GLUT1 deficiency syndrome 2; Epilepsy, idiopathic generalized, susceptibility to, 12; Glutamate formiminotransferase deficiency; Glutaric acidemia IIA and IIB; Glutaric aciduria, type 1; Gluthathione synthetase deficiency; Glycogen storage disease 0 (muscle), II (adult form), IXa2, IXc, type 1A; type II, type IV, IV (combined hepatic and myopathic), type V, and type VI; Goldmann-Favre syndrome; Gordon syndrome; Gorlin syndrome; Holoprosencephaly sequence; Holoprosencephaly 7; Granulomatous disease, chronic, X-linked, variant; Granulosa cell tumor of the ovary; Gray platelet syndrome; Griscelli syndrome type 3; Groenouw corneal dystrophy type I; Growth and mental retardation, mandibulofacial dysostosis, microcephaly, and cleft palate; Growth hormone deficiency with pituitary anomalies; Growth hormone insensitivity with immunodeficiency; GTP cyclohydrolase I deficiency; Haj du-Cheney syndrome; Hand foot uterus syndrome; Hearing impairment; Hemangioma, capillary infantile; Hematologic neoplasm; Hemochromatosis type 1, 2B, and 3; Microvascular complications of diabetes 7; Transferrin serum level quantitative trait locus 2; Hemoglobin H disease, nondeletional; Hemolytic anemia, nonspherocytic, due to glucose phosphate isomerase deficiency; Hemophagocytic lymphohistiocytosis, familial, 2; Hemophagocytic lymphohistiocytosis, familial, 3; Heparin cofactor II deficiency; Hereditary acrodermatitis enteropathica; Hereditary breast and ovarian cancer syndrome; Ataxia-telangiectasia-like disorder; Hereditary diffuse gastric cancer; Hereditary diffuse leukoencephalopathy with spheroids; Hereditary factors II, IX, VIII deficiency disease; Hereditary hemorrhagic telangiectasia type 2; Hereditary insensitivity to pain with anhidrosis; Hereditary lymphedema type I; Hereditary motor and sensory neuropathy with optic atrophy; Hereditary myopathy with early respiratory failure; Hereditary neuralgic amyotrophy; Hereditary Nonpolyposis Colorectal Neoplasms; Lynch syndrome I and II; Hereditary pancreatitis; Pancreatitis, chronic, susceptibility to; Hereditary sensory and autonomic neuropathy type IIB and IIA; Hereditary sideroblastic anemia; Hermansky-Pudlak syndrome 1, 3, 4, and 6; Heterotaxy, visceral, 2, 4, and 6, autosomal; Heterotaxy, visceral, X-linked; Heterotopia; Histiocytic medullary reticulosis; Histiocytosis-lymphadenopathy plus syndrome; Holocarboxylase synthetase deficiency; Holoprosencephaly 2, 3, 7, and 9; Holt-Oram syndrome; Homocysteinemia due to MTHFR deficiency, CBS deficiency, and Homocystinuria, pyridoxine-responsive; Homocystinuria-Megaloblastic anemia due to defect in cobalamin metabolism, cblE complementation type; Howel-Evans syndrome; Hurler syndrome; Hutchinson-Gilford syndrome; Hydrocephalus; Hyperammonemia, type III; Hypercholesterolaemia and Hypercholesterolemia, autosomal recessive; Hyperekplexia 2 and Hyperekplexia hereditary; Hyperferritinemia cataract syndrome; Hyperglycinuria; Hyperimmunoglobulin D with periodic fever; Mevalonic aciduria; Hyperimmunoglobulin E syndrome; Hyperinsulinemic hypoglycemia familial 3, 4, and 5; Hyperinsulinism-hyperammonemia syndrome; Hyperlysinemia; Hypermanganesemia with dystonia, polycythemia and cirrhosis; Hyperornithinemia-hyperammonemia-homocitrullinuria syndrome; Hyperparathyroidism 1 and 2; Hyperparathyroidism, neonatal severe; Hyperphenylalaninemia, bh4-deficient, a, due to partial pts deficiency, BH4-deficient, D, and non-pku; Hyperphosphatasia with mental retardation syndrome 2, 3, and 4; Hypertrichotic osteochondrodysplasia; Hypobetalipoproteinemia, familial, associated with apob32; Hypocalcemia, autosomal dominant 1; Hypocalciuric hypercalcemia, familial, types 1 and 3; Hypochondrogenesis; Hypochromic microcytic anemia with iron overload; Hypoglycemia with deficiency of glycogen synthetase in the liver; Hypogonadotropic hypogonadism 11 with or without anosmia; Hypohidrotic ectodermal dysplasia with immune deficiency; Hypohidrotic X-linked ectodermal dysplasia; Hypokalemic periodic paralysis 1 and 2; Hypomagnesemia 1, intestinal; Hypomagnesemia, seizures, and mental retardation; Hypomyelinating leukodystrophy 7; Hypoplastic left heart syndrome; Atrioventricular septal defect and common atrioventricular junction; Hypospadias 1 and 2, X-linked; Hypothyroidism, congenital, nongoitrous, 1; Hypotrichosis 8 and 12; Hypotrichosis-lymphedema-telangiectasia syndrome; I blood group system; Ichthyosis bullosa of Siemens; Ichthyosis exfoliativa; Ichthyosis prematurity syndrome; Idiopathic basal ganglia calcification 5; Idiopathic fibrosing alveolitis, chronic form; Dyskeratosis congenita, autosomal dominant, 2 and 5; Idiopathic hypercalcemia of infancy; Immune dysfunction with T-cell inactivation due to calcium entry defect 2; Immunodeficiency 15, 16, 19, 30, 31C, 38, 40, 8, due to defect in cd3-zeta, with hyper IgM type 1 and 2, and X-Linked, with magnesium defect, Epstein-Barr virus infection, and neoplasia; Immunodeficiency-centromeric instability-facial anomalies syndrome 2; Inclusion body myopathy 2 and 3; Nonaka myopathy; Infantile convulsions and paroxysmal choreoathetosis, familial; Infantile cortical hyperostosis; Infantile GM1 gangliosidosis; Infantile hypophosphatasia; Infantile nephronophthisis; Infantile nystagmus, X-linked; Infantile Parkinsonism-dystonia; Infertility associated with multi-tailed spermatozoa and excessive DNA; Insulin resistance; Insulin-resistant diabetes mellitus and acanthosis nigricans; Insulin-dependent diabetes mellitus secretory diarrhea syndrome; Interstitial nephritis, karyomegalic; Intrauterine growth retardation, metaphyseal dysplasia, adrenal hypoplasia congenita, and genital anomalies; Iodotyrosyl coupling defect; IRAK4 deficiency; Iridogoniodysgenesis dominant type and type 1; Iron accumulation in brain; Ischiopatellar dysplasia; Islet cell hyperplasia; Isolated 17,20-lyase deficiency; Isolated lutropin deficiency; Isovaleryl-CoA dehydrogenase deficiency; Jankovic Rivera syndrome; Jervell and Lange-Nielsen syndrome 2; Joubert syndrome 1, 6, 7, 9/15 (digenic), 14, 16, and 17, and Orofaciodigital syndrome xiv; Junctional epidermolysis bullosa gravis of Herlitz; Juvenile GM>1<gangliosidosis; Juvenile polyposis syndrome; Juvenile polyposis/hereditary hemorrhagic telangiectasia syndrome; Juvenile retinoschisis; Kabuki make-up syndrome; Kallmann syndrome 1, 2, and 6; Delayed puberty; Kanzaki disease; Karak syndrome; Kartagener syndrome; Kenny-Caffey syndrome type 2; Keppen-Lubinsky syndrome; Keratoconus 1; Keratosis follicularis; Keratosis palmoplantaris striata 1; Kindler syndrome; L-2-hydroxyglutaric aciduria; Larsen syndrome, dominant type; Lattice corneal dystrophy Type III; Leber amaurosis; Zellweger syndrome; Peroxisome biogenesis disorders; Zellweger syndrome spectrum; Leber congenital amaurosis 11, 12, 13, 16, 4, 7, and 9; Leber optic atrophy; Aminoglycoside-induced deafness; Deafness, nonsyndromic sensorineural, mitochondrial; Left ventricular noncompaction 5; Left-right axis malformations; Leigh disease; Mitochondrial short-chain Enoyl-CoA Hydratase 1 deficiency; Leigh syndrome due to mitochondrial complex I deficiency; Leiner disease; Leri Weill dyschondrosteosis; Lethal congenital contracture syndrome 6; Leukocyte adhesion deficiency type I and III; Leukodystrophy, Hypomyelinating, 11 and 6; Leukoencephalopathy with ataxia, with Brainstem and Spinal Cord Involvement and Lactate Elevation, with vanishing white matter, and progressive, with ovarian failure; Leukonychia totalis; Lewy body dementia; Lichtenstein-Knorr Syndrome; Li-Fraumeni syndrome 1; Lig4 syndrome; Limb-girdle muscular dystrophy, type 1B, 2A, 2B, 2D, C1, C5, C9, C14; Congenital muscular dystrophy-dystroglycanopathy with brain and eye anomalies, type A14 and B14; Lipase deficiency combined; Lipid proteinosis; Lipodystrophy, familial partial, type 2 and 3; Lissencephaly 1, 2 (X-linked), 3, 6 (with microcephaly), X-linked; Subcortical laminar heterotopia, X-linked; Liver failure acute infantile; Loeys-Dietz syndrome 1, 2, 3; Long QT syndrome 1, 2, 2/9, 2/5, (digenic), 3, 5 and 5, acquired, susceptibility to; Lung cancer; Lymphedema, hereditary, id; Lymphedema, primary, with myelodysplasia; Lymphoproliferative syndrome 1, 1 (X-linked), and 2; Lysosomal acid lipase deficiency; Macrocephaly, macrosomia, facial dysmorphism syndrome; Macular dystrophy, vitelliform, adult-onset; Malignant hyperthermia susceptibility type 1; Malignant lymphoma, non-Hodgkin; Malignant melanoma; Malignant tumor of prostate; Mandibuloacral dysostosis; Mandibuloacral dysplasia with type A or B lipodystrophy, atypical; Mandibulofacial dysostosis, Treacher Collins type, autosomal recessive; Mannose-binding protein deficiency; Maple syrup urine disease type 1A and type 3; Marden Walker like syndrome; Marfan syndrome; Marinesco-Sj\xc3\xb6gren syndrome; Martsolf syndrome; Maturity-onset diabetes of the young, type 1, type 2, type 11, type 3, and type 9; May-Hegglin anomaly; MYH9 related disorders; Sebastian syndrome; McCune-Albright syndrome; Somatotroph adenoma; Sex cord-stromal tumor; Cushing syndrome; McKusick Kaufman syndrome; McLeod neuroacanthocytosis syndrome; Meckel-Gruber syndrome; Medium-chain acyl-coenzyme A dehydrogenase deficiency; Medulloblastoma; Megalencephalic leukoencephalopathy with subcortical cysts land 2a; Megalencephaly cutis marmorata telangiectatica congenital; PIK3CA Related Overgrowth Spectrum; Megalencephaly-polymicrogyria-polydactyly-hydrocephalus syndrome 2; Megaloblastic anemia, thiamine-responsive, with diabetes mellitus and sensorineural deafness; Meier-Gorlin syndromes land 4; Melnick-Needles syndrome; Meningioma; Mental retardation, X-linked, 3, 21, 30, and 72; Mental retardation and microcephaly with pontine and cerebellar hypoplasia; Mental retardation X-linked syndromic 5; Mental retardation, anterior maxillary protrusion, and strabismus; Mental retardation, autosomal dominant 12, 13, 15, 24, 3, 30, 4, 5, 6, and 9; Mental retardation, autosomal recessive 15, 44, 46, and 5; Mental retardation, stereotypic movements, epilepsy, and/or cerebral malformations; Mental retardation, syndromic, Claes-Jensen type, X-linked; Mental retardation, X-linked, nonspecific, syndromic, Hedera type, and syndromic, wu type; Merosin deficient congenital muscular dystrophy; Metachromatic leukodystrophy juvenile, late infantile, and adult types; Metachromatic leukodystrophy; Metatrophic dysplasia; Methemoglobinemia types I and 2; Methionine adenosyltransferase deficiency, autosomal dominant; Methylmalonic acidemia with homocystinuria, Methylmalonic aciduria cb1B type, Methylmalonic aciduria due to methylmalonyl-CoA mutase deficiency; METHYLMALONIC ACIDURIA, mut(0) TYPE; Microcephalic osteodysplastic primordial dwarfism type 2; Microcephaly with or without chorioretinopathy, lymphedema, or mental retardation; Microcephaly, hiatal hernia and nephrotic syndrome; Microcephaly; Hypoplasia of the corpus callosum; Spastic paraplegia 50, autosomal recessive; Global developmental delay; CNS hypomyelination; Brain atrophy; Microcephaly, normal intelligence and immunodeficiency; Microcephaly-capillary malformation syndrome; Microcytic anemia; Microphthalmia syndromic 5, 7, and 9; Microphthalmia, isolated 3, 5, 6, 8, and with coloboma 6; Microspherophakia; Migraine, familial basilar; Miller syndrome; Minicore myopathy with external ophthalmoplegia; Myopathy, congenital with cores; Mitchell-Riley syndrome; mitochondrial 3-hydroxy-3-methylglutaryl-CoA synthase deficiency; Mitochondrial complex I, II, III, III (nuclear type 2, 4, or 8) deficiency; Mitochondrial DNA depletion syndrome 11, 12 (cardiomyopathic type), 2, 4B (MNGIE type), 8B (MNGIE type); Mitochondrial DNA-depletion syndrome 3 and 7, hepatocerebral types, and 13 (encephalomyopathic type); Mitochondrial phosphate carrier and pyruvate carrier deficiency; Mitochondrial trifunctional protein deficiency; Long-chain 3-hydroxyacyl-CoA dehydrogenase deficiency; Miyoshi muscular dystrophy 1; Myopathy, distal, with anterior tibial onset; Mohr-Tranebjaerg syndrome; Molybdenum cofactor deficiency, complementation group A; Mowat-Wilson syndrome; Mucolipidosis III Gamma; Mucopolysaccharidosis type VI, type VI (severe), and type VII; Mucopolysaccharidosis, MPS-I-HIS, MPS-II, MPS-III-A, MPS-III-B, MPS-III-C, MPS-IV-A, MPS—IV-B; Retinitis Pigmentosa 73; Gangliosidosis GM1 type1 (with cardiac involvement) 3; Multicentric osteolysis nephropathy; Multicentric osteolysis, nodulosis and arthropathy; Multiple congenital anomalies; Atrial septal defect 2; Multiple congenital anomalies-hypotonia-seizures syndrome 3; Multiple Cutaneous and Mucosal Venous Malformations; Multiple endocrine neoplasia, types land 4; Multiple epiphyseal dysplasia 5 or Dominant; Multiple gastrointestinal atresias; Multiple pterygium syndrome Escobar type; Multiple sulfatase deficiency; Multiple synostoses syndrome 3; Muscle AMP deaminase deficiency; Muscle eye brain disease; Muscular dystrophy, congenital, megaconial type; Myasthenia, familial infantile, 1; Myasthenic Syndrome, Congenital, 11, associated with acetylcholine receptor deficiency; Myasthenic Syndrome, Congenital, 17, 2A (slow-channel), 4B (fast-channel), and without tubular aggregates; Myeloperoxidase deficiency; MYH-associated polyposis; Endometrial carcinoma; Myocardial infarction 1; Myoclonic dystonia; Myoclonic-Atonic Epilepsy; Myoclonus with epilepsy with ragged red fibers; Myofibrillar myopathy 1 and ZASP-related; Myoglobinuria, acute recurrent, autosomal recessive; Myoneural gastrointestinal encephalopathy syndrome; Cerebellar ataxia infantile with progressive external ophthalmoplegia; Mitochondrial DNA depletion syndrome 4B, MNGIE type; Myopathy, centronuclear, 1, congenital, with excess of muscle spindles, distal, 1, lactic acidosis, and sideroblastic anemia 1, mitochondrial progressive with congenital cataract, hearing loss, and developmental delay, and tubular aggregate, 2; Myopia 6; Myosclerosis, autosomal recessive; Myotonia congenital; Congenital myotonia, autosomal dominant and recessive forms; Nail-patella syndrome; Nance-Horan syndrome; Nanophthalmos 2; Navajo neurohepatopathy; Nemaline myopathy 3 and 9; Neonatal hypotonia; Intellectual disability; Seizures; Delayed speech and language development; Mental retardation, autosomal dominant 31; Neonatal intrahepatic cholestasis caused by citrin deficiency; Nephrogenic diabetes insipidus, Nephrogenic diabetes insipidus, X-linked; Nephrolithiasis/osteoporosis, hypophosphatemic, 2; Nephronophthisis 13, 15 and 4; Infertility; Cerebello-oculo-renal syndrome (nephronophthisis, oculomotor apraxia and cerebellar abnormalities); Nephrotic syndrome, type 3, type 5, with or without ocular abnormalities, type 7, and type 9; Nestor-Guillermo progeria syndrome; Neu-Laxova syndrome 1; Neurodegeneration with brain iron accumulation 4 and 6; Neuroferritinopathy; Neurofibromatosis, type land type 2; Neurofibrosarcoma; Neurohypophyseal diabetes insipidus; Neuropathy, Hereditary Sensory, Type IC; Neutral 1 amino acid transport defect; Neutral lipid storage disease with myopathy; Neutrophil immunodeficiency syndrome; Nicolaides-Baraitser syndrome; Niemann-Pick disease type C1, C2, type A, and type C1, adult form; Non-ketotic hyperglycinemia; Noonan syndrome 1 and 4, LEOPARD syndrome 1; Noonan syndrome-like disorder with or without juvenile myelomonocytic leukemia; Normokalemic periodic paralysis, potassium-sensitive; Norum disease; Epilepsy, Hearing Loss, And Mental Retardation Syndrome; Mental Retardation, X-Linked 102 and syndromic 13; Obesity; Ocular albinism, type I; Oculocutaneous albinism type 1B, type 3, and type 4; Oculodentodigital dysplasia; Odontohypophosphatasia; Odontotrichomelic syndrome; Oguchi disease; Oligodontia-colorectal cancer syndrome; Opitz G/BBB syndrome; Optic atrophy 9; Oral-facial-digital syndrome; Ornithine aminotransferase deficiency; Orofacial cleft 11 and 7, Cleft lip/palate-ectodermal dysplasia syndrome; Orstavik Lindemann Solberg syndrome; Osteoarthritis with mild chondrodysplasia; Osteochondritis dissecans; Osteogenesis imperfecta type 12, type 5, type 7, type 8, type I, type III, with normal sclerae, dominant form, recessive perinatal lethal; Osteopathia striata with cranial sclerosis; Osteopetrosis autosomal dominant type 1 and 2, recessive 4, recessive 1, recessive 6; Osteoporosis with pseudoglioma; Oto-palato-digital syndrome, types I and II; Ovarian dysgenesis 1; Ovarioleukodystrophy; Pachyonychia congenita 4 and type 2; Paget disease of bone, familial; Pallister-Hall syndrome; Palmoplantar keratoderma, nonepidermolytic, focal or diffuse; Pancreatic agenesis and congenital heart disease; Papillon-Lef\xc3\xa8vre syndrome; Paragangliomas 3; Paramyotonia congenita of von Eulenburg; Parathyroid carcinoma; Parkinson disease 14, 15, 19 (juvenile-onset), 2, 20 (early-onset), 6, (autosomal recessive early-onset, and 9; Partial albinism; Partial hypoxanthine-guanine phosphoribosyltransferase deficiency; Patterned dystrophy of retinal pigment epithelium; PC-K6a; Pelizaeus-Merzbacher disease; Pendred syndrome; Peripheral demyelinating neuropathy, central dysmyelination; Hirschsprung disease; Permanent neonatal diabetes mellitus; Diabetes mellitus, permanent neonatal, with neurologic features; Neonatal insulin-dependent diabetes mellitus; Maturity-onset diabetes of the young, type 2; Peroxisome biogenesis disorder 14B, 2A, 4A, 5B, 6A, 7A, and 7B; Perrault syndrome 4; Perry syndrome; Persistent hyperinsulinemic hypoglycemia of infancy; familial hyperinsulinism; Phenotypes; Phenylketonuria; Pheochromocytoma; Hereditary Paraganglioma-Pheochromocytoma Syndromes; Paragangliomas 1; Carcinoid tumor of intestine; Cowden syndrome 3; Phosphoglycerate dehydrogenase deficiency; Phosphoglycerate kinase 1 deficiency; Photosensitive trichothiodystrophy; Phytanic acid storage disease; Pick disease; Pierson syndrome; Pigmentary retinal dystrophy; Pigmented nodular adrenocortical disease, primary, 1; Pilomatrixoma; Pitt-Hopkins syndrome; Pituitary dependent hypercortisolism; Pituitary hormone deficiency, combined 1, 2, 3, and 4; Plasminogen activator inhibitor type 1 deficiency; Plasminogen deficiency, type I; Platelet-type bleeding disorder 15 and 8; Poikiloderma, hereditary fibrosing, with tendon contractures, myopathy, and pulmonary fibrosis; Polycystic kidney disease 2, adult type, and infantile type; Polycystic lipomembranous osteodysplasia with sclerosing leukoencephalopathy; Polyglucosan body myopathy 1 with or without immunodeficiency; Polymicrogyria, asymmetric, bilateral frontoparietal; Polyneuropathy, hearing loss, ataxia, retinitis pigmentosa, and cataract; Pontocerebellar hypoplasia type 4; Popliteal pterygium syndrome; Porencephaly 2; Porokeratosis 8, disseminated superficial actinic type; Porphobilinogen synthase deficiency; Porphyria cutanea tarda; Posterior column ataxia with retinitis pigmentosa; Posterior polar cataract type 2; Prader-Willi-like syndrome; Premature ovarian failure 4, 5, 7, and 9; Primary autosomal recessive microcephaly 10, 2, 3, and 5; Primary ciliary dyskinesia 24; Primary dilated cardiomyopathy; Left ventricular noncompaction 6; 4, Left ventricular noncompaction 10; Paroxysmal atrial fibrillation; Primary hyperoxaluria, type I, type, and type III; Primary hypertrophic osteoarthropathy, autosomal recessive 2; Primary hypomagnesemia; Primary open angle glaucoma juvenile onset 1; Primary pulmonary hypertension; Primrose syndrome; Progressive familial heart block type 1B; Progressive familial intrahepatic cholestasis 2 and 3; Progressive intrahepatic cholestasis; Progressive myoclonus epilepsy with ataxia; Progressive pseudorheumatoid dysplasia; Progressive sclerosing poliodystrophy; Prolidase deficiency; Proline dehydrogenase deficiency; Schizophrenia 4; Properdin deficiency, X-linked; Propionic academia; Proprotein convertase 1/3 deficiency; Prostate cancer, hereditary, 2; Protan defect; Proteinuria; Finnish congenital nephrotic syndrome; Proteus syndrome; Breast adenocarcinoma; Pseudoachondroplastic spondyloepiphyseal dysplasia syndrome; Pseudohypoaldosteronism type 1 autosomal dominant and recessive and type 2; Pseudohypoparathyroidism type 1A, Pseudopseudohypoparathyroidism; Pseudoneonatal adrenoleukodystrophy; Pseudoprimary hyperaldosteronism; Pseudoxanthoma elasticum; Generalized arterial calcification of infancy 2; Pseudoxanthoma elasticum-like disorder with multiple coagulation factor deficiency; Psoriasis susceptibility 2; PTEN hamartoma tumor syndrome; Pulmonary arterial hypertension related to hereditary hemorrhagic telangiectasia; Pulmonary Fibrosis And/Or Bone Marrow Failure, Telomere-Related, 1 and 3; Pulmonary hypertension, primary, 1, with hereditary hemorrhagic telangiectasia; Purine-nucleoside phosphorylase deficiency; Pyruvate carboxylase deficiency; Pyruvate dehydrogenase E1-alpha deficiency; Pyruvate kinase deficiency of red cells; Raine syndrome; Rasopathy; Recessive dystrophic epidermolysis bullosa; Nail disorder, nonsyndromic congenital, 8; Reifenstein syndrome; Renal adysplasia; Renal carnitine transport defect; Renal coloboma syndrome; Renal dysplasia; Renal dysplasia, retinal pigmentary dystrophy, cerebellar ataxia and skeletal dysplasia; Renal tubular acidosis, distal, autosomal recessive, with late-onset sensorineural hearing loss, or with hemolytic anemia; Renal tubular acidosis, proximal, with ocular abnormalities and mental retardation; Retinal cone dystrophy 3B; Retinitis pigmentosa; Retinitis pigmentosa 10, 11, 12, 14, 15, 17, and 19; Retinitis pigmentosa 2, 20, 25, 35, 36, 38, 39, 4, 40, 43, 45, 48, 66, 7, 70, 72; Retinoblastoma; Rett disorder; Rhabdoid tumor predisposition syndrome 2; Rhegmatogenous retinal detachment, autosomal dominant; Rhizomelic chondrodysplasia punctata type 2 and type 3; Roberts-SC phocomelia syndrome; Robinow Sorauf syndrome; Robinow syndrome, autosomal recessive, autosomal recessive, with brachy-syn-polydactyly; Rothmund-Thomson syndrome; Rapadilino syndrome; RRM2B-related mitochondrial disease; Rubinstein-Taybi syndrome; Salla disease; Sandhoff disease, adult and infantil types; Sarcoidosis, early-onset; Blau syndrome; Schindler disease, type 1; Schizencephaly; Schizophrenia 15; Schneckenbecken dysplasia; Schwannomatosis 2; Schwartz Jampel syndrome type 1; Sclerocornea, autosomal recessive; Sclerosteosis; Secondary hypothyroidism; Segawa syndrome, autosomal recessive; Senior-Loken syndrome 4 and 5, Sensory ataxic neuropathy, dysarthria, and ophthalmoparesis; Sepiapterin reductase deficiency; SeSAME syndrome; Severe combined immunodeficiency due to ADA deficiency, with microcephaly, growth retardation, and sensitivity to ionizing radiation, atypical, autosomal recessive, T cell-negative, B cell-positive, NK cell-negative of NK-positive; Partial adenosine deaminase deficiency; Severe congenital neutropenia; Severe congenital neutropenia 3, autosomal recessive or dominant; Severe congenital neutropenia and 6, autosomal recessive; Severe myoclonic epilepsy in infancy; Generalized epilepsy with febrile seizures plus, types 1 and 2; Severe X-linked myotubular myopathy; Short QT syndrome 3; Short stature with nonspecific skeletal abnormalities; Short stature, auditory canal atresia, mandibular hypoplasia, skeletal abnormalities; Short stature, onychodysplasia, facial dysmorphism, and hypotrichosis; Primordial dwarfism; Short-rib thoracic dysplasia 11 or 3 with or without polydactyly; Sialidosis type I and II; Silver spastic paraplegia syndrome; Slowed nerve conduction velocity, autosomal dominant; Smith-Lemli-Opitz syndrome; Snyder Robinson syndrome; Somatotroph adenoma; Prolactinoma; familial, Pituitary adenoma predisposition; Sotos syndrome 1 or 2; Spastic ataxia 5, autosomal recessive, Charlevoix-Saguenay type, 1, 10, or 11, autosomal recessive; Amyotrophic lateral sclerosis type 5; Spastic paraplegia 15, 2, 3, 35, 39, 4, autosomal dominant, 55, autosomal recessive, and 5A; Bile acid synthesis defect, congenital, 3; Spermatogenic failure 11, 3, and 8; Spherocytosis types 4 and 5; Spheroid body myopathy; Spinal muscular atrophy, lower extremity predominant 2, autosomal dominant; Spinal muscular atrophy, type II; Spinocerebellar ataxia 14, 21, 35, 40, and 6; Spinocerebellar ataxia autosomal recessive 1 and 16; Splenic hypoplasia; Spondylocarpotarsal synostosis syndrome; Spondylocheirodysplasia, Ehlers-Danlos syndrome-like, with immune dysregulation, Aggrecan type, with congenital joint dislocations, short limb-hand type, Sedaghatian type, with cone-rod dystrophy, and Kozlowski type; Parastremmatic dwarfism; Stargardt disease 1; Cone-rod dystrophy 3; Stickler syndrome type 1; Kniest dysplasia; Stickler syndrome, types 1 (nonsyndromic ocular) and 4; Sting-associated vasculopathy, infantile-onset; Stormorken syndrome; Sturge-Weber syndrome, Capillary malformations, congenital, 1; Succinyl-CoA acetoacetate transferase deficiency; Sucrase-isomaltase deficiency; Sudden infant death syndrome; Sulfite oxidase deficiency, isolated; Supravalvar aortic stenosis; Surfactant metabolism dysfunction, pulmonary, 2 and 3; Symphalangism, proximal, lb; Syndactyly Cenani Lenz type; Syndactyly type 3; Syndromic X-linked mental retardation 16; Talipes equinovarus; Tangier disease; TARP syndrome; Tay-Sachs disease, B1 variant, Gm2-gangliosidosis (adult), Gm2-gangliosidosis (adult-onset); Temtamy syndrome; Tenorio Syndrome; Terminal osseous dysplasia; Testosterone 17-beta-dehydrogenase deficiency; Tetraamelia, autosomal recessive; Tetralogy of Fallot; Hypoplastic left heart syndrome 2; Truncus arteriosus; Malformation of the heart and great vessels; Ventricular septal defect 1; Thiel-Behnke corneal dystrophy; Thoracic aortic aneurysms and aortic dissections; Marfanoid habitus; Three M syndrome 2; Thrombocytopenia, platelet dysfunction, hemolysis, and imbalanced globin synthesis; Thrombocytopenia, X-linked; Thrombophilia, hereditary, due to protein C deficiency, autosomal dominant and recessive; Thyroid agenesis; Thyroid cancer, follicular; Thyroid hormone metabolism, abnormal; Thyroid hormone resistance, generalized, autosomal dominant; Thyrotoxic periodic paralysis and Thyrotoxic periodic paralysis 2; Thyrotropin-releasing hormone resistance, generalized; Timothy syndrome; TNF receptor-associated periodic fever syndrome (TRAPS); Tooth agenesis, selective, 3 and 4; Torsades de pointes; Townes-Brocks-branchiootorenal-like syndrome; Transient bullous dermolysis of the newborn; Treacher collins syndrome 1; Trichomegaly with mental retardation, dwarfism and pigmentary degeneration of retina; Trichorhinophalangeal dysplasia type I; Trichorhinophalangeal syndrome type 3; Trimethylaminuria; Tuberous sclerosis syndrome; Lymphangiomyomatosis; Tuberous sclerosis 1 and 2; Tyrosinase-negative oculocutaneous albinism; Tyrosinase-positive oculocutaneous albinism; Tyrosinemia type I; UDPglucose-4-epimerase deficiency; Ullrich congenital muscular dystrophy; Ulna and fibula absence of with severe limb deficiency; Upshaw-Schulman syndrome; Urocanate hydratase deficiency; Usher syndrome, types 1, 1B, 1D, 1G, 2A, 2C, and 2D; Retinitis pigmentosa 39; UV-sensitive syndrome; Van der Woude syndrome; Van Maldergem syndrome 2; Hennekam lymphangiectasia-lymphedema syndrome 2; Variegate porphyria; Ventriculomegaly with cystic kidney disease; Verheij syndrome; Very long chain acyl-CoA dehydrogenase deficiency; Vesicoureteral reflux 8; Visceral heterotaxy 5, autosomal; Visceral myopathy; Vitamin D-dependent rickets, types land 2; Vitelliform dystrophy; von Willebrand disease type 2M and type 3; Waardenburg syndrome type 1, 4C, and 2E (with neurologic involvement); Klein-Waardenberg syndrome; Walker-Warburg congenital muscular dystrophy; Warburg micro syndrome 2 and 4; Warts, hypogammaglobulinemia, infections, and myelokathexis; Weaver syndrome; Weill-Marchesani syndrome 1 and 3; Weill-Marchesani-like syndrome; Weissenbacher-Zweymuller syndrome; Werdnig-Hoffmann disease; Charcot-Marie-Tooth disease; Werner syndrome; WFS1-Related Disorders; Wiedemann-Steiner syndrome; Wilson disease; Wolfram-like syndrome, autosomal dominant; Worth disease; Van Buchem disease type 2; Xeroderma pigmentosum, complementation group b, group D, group E, and group G; X-linked agammaglobulinemia; X-linked hereditary motor and sensory neuropathy; X-linked ichthyosis with steryl-sulfatase deficiency; X-linked periventricular heterotopia; Oto-palato-digital syndrome, type I; X-linked severe combined immunodeficiency; Zimmermann-Laband syndrome and Zimmermann-Laband syndrome 2; and Zonular pulverulent cataract 3.

[0509] In some aspects, the present disclosure provides uses of any one of the base editors described herein and a guide RNA targeting this base editor to a target A:T base pair in a nucleic acid molecule in the manufacture of a kit for nucleic acid editing, wherein the nucleic acid editing comprises contacting the nucleic acid molecule with the base editor and guide RNA under conditions suitable for the substitution of the adenine (A) of the A:T nucleobase pair with an guanine (G). In some embodiments of these uses, the nucleic acid molecule is a double-stranded DNA molecule. In some embodiments, the step of contacting induces separation of the double-stranded DNA at a target region. In some embodiments, the step of contacting thereby comprises the nicking of one strand of the double-stranded DNA, wherein the one strand comprises an unmutated strand that comprises the T of the target A:T nucleobase pair.

[0510] In some aspects, the present disclosure provides uses of any one of the base editors described herein and a guide RNA targeting this base editor to a target A:T base pair in a nucleic acid molecule in the manufacture of a kit for evaluating the off-target effects of a base editor, wherein the step of evaluating the off-target effects comprises contacting the base editor with the nucleic acid molecule and determining off-target effects in accordance with any one of the disclosed methods. In some embodiments of these uses, the nucleic acid molecule is a double-stranded DNA molecule. In some embodiments, the step of contacting of induces separation of the double-stranded DNA at a target region. In some embodiments, the step of contacting thereby comprises the nicking of one strand of the double-stranded DNA, wherein the one strand comprises an unmutated strand that comprises the T of the target A:T nucleobase pair.

[0511] In some embodiments of the described uses, the step of contacting is performed in vitro. In other embodiments, the step of contacting is performed in vivo. In some embodiments, the step of contacting is performed in a subject (e.g., a human subject or a non-human animal subject). In some embodiments, the step of contacting is performed in a cell, such as a human or non-human animal cell.

[0512] The present disclosure also provides uses of any one of the base editors described herein as a medicament. The present disclosure also provides uses of any one of the complexes of base editors and guide RNAs described herein as a medicament.

### Pharmaceutical Compositions

[0513] Other aspects of the present disclosure relate to pharmaceutical compositions comprising any of the adenosine deaminases, base editors, or the base editor-gRNA complexes described herein. Still other aspects of the present disclosure relate to pharmaceutical compositions comprising any of the polynucleotides or vectors that comprise a nucleic acid segment that encodes the adenosine deaminases, base editors, or the base editor-gRNA complexes described herein. The disclosure further provides pharmaceutical compositions that comprise particles comprising the rAAV vectors, dual rAAV vectors and ribonucleoproteins described herein.

[0514] The term “pharmaceutical composition”, as used herein, refers to a composition formulated for pharmaceutical use. In some embodiments, the pharmaceutical composition further comprises a pharmaceutically acceptable carrier. In some embodiments, the pharmaceutical composition comprises additional agents (e.g. for specific delivery, increasing half-life, or other therapeutic compounds).

[0515] In some embodiments, any of the base editors, gRNAs, and/or complexes described herein are provided as part of a pharmaceutical composition. In some embodiments, the pharmaceutical composition comprises any of the base editors provided herein. In some embodiments, the pharmaceutical composition comprises any of the complexes provided herein. In some embodiments pharmaceutical composition comprises a gRNA, a base editor, and a pharmaceutically acceptable excipient. Pharmaceutical compositions may optionally comprise one or more additional therapeutically active substances.

[0516] In some embodiments, compositions provided herein are formulated for delivery to a subject, for example, to a human subject, in order to effect a targeted genomic modification within the subject. In some embodiments, cells are obtained from the subject and contacted with a any of the pharmaceutical compositions provided herein. In some embodiments, cells removed from a subject and contacted ex vivo with a pharmaceutical composition are re-introduced into the subject, optionally after the desired genomic modification has been effected or detected in the cells. Methods of delivering pharmaceutical compositions comprising nucleases are known, and are described, for example, in U.S. Pat. Nos. 6,453,242; 6,503,717; 6,534,261; 6,599,692; 6,607,882; 6,689,558; 6,824,978; 6,933,113; 6,979,539; 7,013,219; 7,163,824, 9,526,784; 9,737,604; and U.S. Patent Publication Nos. 2018/0127780, published May 10, 2018, and 2018/0236081, published Aug. 23, 2018, the disclosures of all of which are incorporated by reference herein in their entireties. Although the descriptions of pharmaceutical compositions provided herein are principally directed to pharmaceutical compositions which are suitable for administration to humans, it will be understood by the skilled artisan that such compositions are generally suitable for administration to animals or organisms of all sorts. Modification of pharmaceutical compositions suitable for administration to humans in order to render the compositions suitable for administration to various animals is well understood, and the ordinarily skilled veterinary pharmacologist can design and/or perform such modification with merely ordinary, if any, experimentation. Subjects to which administration of the pharmaceutical compositions is contemplated include, but are not limited to, humans and/or other primates; mammals, domesticated animals, pets, and commercially relevant mammals such as cattle, pigs, horses, sheep, cats, dogs, mice, and/or rats; and/or birds, including commercially relevant birds such as chickens, ducks, geese, and/or turkeys.

[0517] Formulations of the pharmaceutical compositions described herein may be prepared by any method known or hereafter developed in the art of pharmacology. In general, such preparatory methods include the step of bringing the active ingredient(s) into association with an excipient and/or one or more other accessory ingredients, and then, if necessary and/or desirable, shaping and/or packaging the product into a desired single- or multi-dose unit.

[0518] Pharmaceutical formulations may additionally comprise a pharmaceutically acceptable excipient, which, as used herein, includes any and all solvents, dispersion media, diluents, or other liquid vehicles, dispersion or suspension aids, surface active agents, isotonic agents, thickening or emulsifying agents, preservatives, solid binders, lubricants and the like, as suited to the particular dosage form desired. Remington's The Science and Practice of Pharmacy, 21′ Edition, A. R. Gennaro (Lippincott, Williams & Wilkins, Baltimore, Md., 2006; incorporated in its entirety herein by reference) discloses various excipients used in formulating pharmaceutical compositions and known techniques for the preparation thereof. See also PCT application PCT/US2010/055131, filed Nov. 2, 2010 (Publication No. WO 2011/053982, published May 5, 2011), incorporated in its entirety herein by reference, for additional suitable methods, reagents, excipients and solvents for producing pharmaceutical compositions comprising a nuclease. Except insofar as any conventional excipient medium is incompatible with a substance or its derivatives, such as by producing any undesirable biological effect or otherwise interacting in a deleterious manner with any other component(s) of the pharmaceutical composition, its use is contemplated to be within the scope of this disclosure.

[0519] As used here, the term “pharmaceutically-acceptable carrier” means a pharmaceutically-acceptable material, composition or vehicle, such as a liquid or solid filler, diluent, excipient, manufacturing aid (e.g., lubricant, talc magnesium, calcium or zinc stearate, or steric acid), or solvent encapsulating material, involved in carrying or transporting the compound from one site (e.g., the delivery site) of the body, to another site (e.g., organ, tissue or portion of the body). A pharmaceutically acceptable carrier is “acceptable” in the sense of being compatible with the other ingredients of the formulation and not injurious to the tissue of the subject (e.g., physiologically compatible, sterile, physiologic pH, etc.). Some examples of materials which can serve as pharmaceutically-acceptable carriers include: (1) sugars, such as lactose, glucose and sucrose; (2) starches, such as corn starch and potato starch; (3) cellulose, and its derivatives, such as sodium carboxymethyl cellulose, methylcellulose, ethyl cellulose, microcrystalline cellulose and cellulose acetate; (4) powdered tragacanth; (5) malt; (6) gelatin; (7) lubricating agents, such as magnesium stearate, sodium lauryl sulfate and talc; (8) excipients, such as cocoa butter and suppository waxes; (9) oils, such as peanut oil, cottonseed oil, safflower oil, sesame oil, olive oil, corn oil and soybean oil; (10) glycols, such as propylene glycol; (11) polyols, such as glycerin, sorbitol, mannitol and polyethylene glycol (PEG); (12) esters, such as ethyl oleate and ethyl laurate; (13) agar; (14) buffering agents, such as magnesium hydroxide and aluminum hydroxide; (15) alginic acid; (16) pyrogen-free water; (17) isotonic saline; (18) Ringer's solution; (19) ethyl alcohol; (20) pH buffered solutions; (21) polyesters, polycarbonates and/or polyanhydrides; (22) bulking agents, such as polypeptides and amino acids (23) serum component, such as serum albumin, HDL and LDL; (22) C2-C12 alcohols, such as ethanol; and (23) other non-toxic compatible substances employed in pharmaceutical formulations. Wetting agents, coloring agents, release agents, coating agents, sweetening agents, flavoring agents, perfuming agents, preservative and antioxidants can also be present in the formulation. The terms such as “excipient”, “carrier”, “pharmaceutically acceptable carrier” or the like are used interchangeably herein.

[0520] In some embodiments, the pharmaceutical composition is formulated for delivery to a subject, e.g., for gene editing. Suitable routes of administrating the pharmaceutical composition described herein include, without limitation: topical, subcutaneous, transdermal, intradermal, intralesional, intraarticular, intraperitoneal, intravesical, transmucosal, gingival, intradental, intracochlear, transtympanic, intraorgan, epidural, intrathecal, intramuscular, intravenous, intravascular, intraosseus, periocular, intratumoral, intracerebral, and intracerebroventricular administration.

[0521] In some embodiments, the pharmaceutical composition described herein is administered locally to a diseased site (e.g., tumor site). In some embodiments, the pharmaceutical composition described herein is administered to a subject by injection, by means of a catheter, by means of a suppository, or by means of an implant, the implant being of a porous, non-porous, or gelatinous material, including a membrane, such as a sialastic membrane, or a fiber.

[0522] In other embodiments, the pharmaceutical composition described herein is delivered in a controlled release system. In one embodiment, a pump may be used (see, e.g., Langer, 1990, Science 249:1527-1533; Sefton, 1989, CRC Crit. Ref. Biomed. Eng. 14:201; Buchwald et al., 1980, Surgery 88:507; Saudek et al., 1989, N. Engl. J. Med. 321:574). In another embodiment, polymeric materials may be used. (See, e.g., Medical Applications of Controlled Release (Langer and Wise eds., CRC Press, Boca Raton, Fla., 1974); Controlled Drug Bioavailability, Drug Product Design and Performance (Smolen and Ball eds., Wiley, New York, 1984); Ranger and Peppas, 1983, Macromol. Sci. Rev. Macromol. Chem. 23:61. See also Levy et al., 1985, Science 228:190; During et al., 1989, Ann. Neurol. 25:351; Howard et al., 1989, J. Neurosurg. 71:105.) Other controlled release systems are discussed, for example, in Langer, supra.

[0523] In some embodiments, the pharmaceutical composition is formulated in accordance with routine procedures as a composition adapted for intravenous or subcutaneous administration to a subject, e.g., a human. In some embodiments, pharmaceutical composition for administration by injection are solutions in sterile isotonic aqueous buffer. Where necessary, the pharmaceutical can also include a solubilizing agent and a local anesthetic such as lignocaine to ease pain at the site of the injection. Generally, the ingredients are supplied either separately or mixed together in unit dosage form, for example, as a dry lyophilized powder or water free concentrate in a hermetically sealed container such as an ampoule or sachette indicating the quantity of active agent. Where the pharmaceutical is to be administered by infusion, it can be dispensed with an infusion bottle containing sterile pharmaceutical grade water or saline. Where the pharmaceutical composition is administered by injection, an ampoule of sterile water for injection or saline can be provided so that the ingredients can be mixed prior to administration.

[0524] A pharmaceutical composition for systemic administration may be a liquid, e.g., sterile saline, lactated Ringer's or Hank's solution. In addition, the pharmaceutical composition can be in solid forms and re-dissolved or suspended immediately prior to use. Lyophilized forms are also contemplated.

[0525] The pharmaceutical composition may be contained within a lipid particle or vesicle, such as a liposome or microcrystal, which is also suitable for parenteral administration. The particles may be of any suitable structure, such as unilamellar or plurilamellar, so long as compositions are contained therein. Compounds may be entrapped in “stabilized plasmid-lipid particles” (SPLP) containing the fusogenic lipid dioleoylphosphatidylethanolamine (DOPE), low levels (5-10 mol %) of cationic lipid, and stabilized by a polyethyleneglycol (PEG) coating (Zhang Y. P. et al., Gene Ther. 1999, 6:1438-47). Positively charged lipids such as N-[1-(2,3-dioleoyloxi)propyl]-N,N,N-trimethyl-amoniummethylsulfate, or “DOTAP,” are particularly preferred for such particles and vesicles. The preparation of such lipid particles is well known. See, e.g., U.S. Pat. Nos. 4,880,635; 4,906,477; 4,911,928; 4,917,951; 4,920,016; and 4,921,757; each of which is incorporated herein by reference.

[0526] The pharmaceutical composition described herein may be administered or packaged as a unit dose, for example. The term “unit dose” when used in reference to a pharmaceutical composition of the present disclosure refers to physically discrete units suitable as unitary dosage for the subject, each unit containing a predetermined quantity of active material calculated to produce the desired therapeutic effect in association with the required diluent; i.e., carrier, or vehicle.

[0527] Further, the pharmaceutical composition may be provided as a pharmaceutical kit comprising (a) a container containing a compound of the invention in lyophilized form and (b) a second container containing a pharmaceutically acceptable diluent (e.g., sterile water) for injection. The pharmaceutically acceptable diluent may be used for reconstitution or dilution of the lyophilized compound of the invention. Optionally associated with such container(s) may be a notice in the form prescribed by a governmental agency regulating the manufacture, use or sale of pharmaceuticals or biological products, which notice reflects approval by the agency of manufacture, use or sale for human administration.

[0528] In another aspect, an article of manufacture containing materials useful for the treatment of the diseases described above is included. In some embodiments, the article of manufacture comprises a container and a label. Suitable containers include, for example, bottles, vials, syringes, and test tubes. The containers may be formed from a variety of materials such as glass or plastic. In some embodiments, the container holds a composition that is effective for treating a disease described herein and may have a sterile access port. For example, the container may be an intravenous solution bag or a vial having a stopper pierceable by a hypodermic injection needle. The active agent in the composition is a compound of the invention. In some embodiments, the label on or associated with the container indicates that the composition is used for treating the disease of choice. The article of manufacture may further comprise a second container comprising a pharmaceutically-acceptable buffer, such as phosphate-buffered saline, Ringer's solution, or dextrose solution. It may further include other materials desirable from a commercial and user standpoint, including other buffers, diluents, filters, needles, syringes, and package inserts with instructions for use.

### Delivery Methods

[0529] The disclosure also provides methods for delivering an adenine base editor described herein (e.g., in the form of an evolved base editor as described herein, or a vector or construct encoding same) into a cell. Such methods may involve transducing (e.g., via transfection) cells with a plurality of complexes each comprising a base editor and a gRNA molecule. In some embodiments, the gRNA is bound to the napDNAbp domain (e.g., nCas9 domain) of the base editor. In some embodiments, each gRNA comprises a guide sequence of at least 10 contiguous nucleotides (e.g., 10, 11, 12, 13, 14, 15, 16, 17, 18, 19, 20, 21, 22, 23, 24, 25, 26, 27, 28, 29, or 30 contiguous nucleotides) that is complementary to a target sequence. In certain embodiments, the methods involve the transfection of nucleic acid constructs (e.g., plasmids and mRNA constructs) that each (or together) encode the components of a complex of base editor and gRNA molecule. In certain embodiments, any of the disclosed base editors and a gRNA are administered as a protein:RNA complex, such as a ribonucleoprotein complex. In some embodiments, any of the disclosed base editors are administered as an mRNA construct, along with the gRNA molecule. In particular embodiments, administration to cells is achieved by electroporation or lipofection.

[0530] In certain embodiments of the disclosed methods, a nucleic acid construct (e.g., an mRNA construct) that encodes the base editor is transfected into the cell separately from the construct that encodes the gRNA molecule. In certain embodiments, these components are encoded on a single construct and transfected together. In other embodiments, the methods disclosed herein involve the introduction into cells of a complex comprising a base editor and gRNA molecule that has been expressed and cloned outside of these cells.

[0531] In some aspects, the invention provides methods comprising delivering one or more polynucleotides, such as or one or more vectors as described herein, one or more transcripts thereof, and/or one or proteins transcribed therefrom, to a host cell. In some aspects, the invention further provides cells produced by such methods, and organisms (such as animals, plants, or fungi) comprising or produced from such cells. In some embodiments, a base editor as described herein in combination with (and optionally complexed with) a guide sequence is delivered to a cell.

[0532] In some embodiments, the method of delivery provided comprises nucleofection, microinjection, biolistics, virosomes, liposomes, immunoliposomes, polycation or lipid:nucleic acid conjugates, naked DNA, artificial virions, and agent-enhanced uptake of DNA.

[0533] In another aspect, the disclosure discloses a pharmaceutical composition comprising any one of the presently disclosed vectors. In certain embodiments, the pharmaceutical composition further comprises a pharmaceutically acceptable excipient. In certain embodiments, the pharmaceutical composition further comprises a lipid and/or polymer. In certain embodiments, the lipid and/or polymer is cationic. The preparation of such lipid particles is well known. See, e.g. U.S. Pat. Nos. 4,880,635; 4,906,477; 4,911,928; 4,917,951; 4,920,016; 4,921,757; and 9,737,604, each of which is incorporated herein by reference.

[0534] Exemplary methods of delivery of nucleic acids include lipofection, nucleofection, electoporation (e.g., MaxCyte electroporation), stable genome integration (e.g., piggybac), microinjection, biolistics, virosomes, liposomes, immunoliposomes, polycation or lipid:nucleic acid conjugates, naked DNA, artificial virions, and agent-enhanced uptake of DNA. Lipofection is described in e.g., U.S. Pat. Nos. 5,049,386, 4,946,787; and 4,897,355) and lipofection reagents are sold commercially (e.g., Transfectam™, Lipofectin™ and SF Cell Line 4D-Nucleofector X Kit™ (Lonza)). Cationic and neutral lipids that are suitable for efficient receptor-recognition lipofection of polynucleotides include those of Feigner, WO 91/17424; WO 91/16024. Delivery may be to cells (e.g. in vitro or ex vivo administration) or target tissues (e.g. in vivo administration). Delivery may be achieved through the use of RNP complexes.

[0535] The preparation of lipid:nucleic acid complexes, including targeted liposomes such as immunolipid complexes, is well known to one of skill in the art (see, e.g., Crystal, Science 270:404-410 (1995); Blaese et al., Cancer Gene Ther. 2:291-297 (1995); Behr et al., Bioconjugate Chem. 5:382-389 (1994); Remy et al., Bioconjugate Chem. 5:647-654 (1994); Gao et al., Gene Therapy 2:710-722 (1995); Ahmad et al., Cancer Res. 52:4817-4820 (1992); U.S. Pat. Nos. 4,186,183, 4,217,344, 4,235,871, 4,261,975, 4,485,054, 4,501,728, 4,774,085, 4,837,028, and 4,946,787).

[0536] In other embodiments, the method of delivery and vector provided herein is an RNP complex. RNP delivery of base editors markedly increases the DNA specificity of base editing. RNP delivery of base editors leads to decoupling of on- and off-target DNA editing. RNP delivery ablates off-target editing at non-repetitive sites while maintaining on-target editing comparable to plasmid delivery, and greatly reduces off-target DNA editing even at the highly repetitive VEGFA site 2. See Rees, H. A. et al., Improving the DNA specificity and applicability of base editing through protein engineering and protein delivery, Nat. Commun. 8, 15790 (2017), U.S. Pat. No. 9,526,784, issued Dec. 27, 2016, and U.S. Pat. No. 9,737,604, issued Aug. 22, 2017, each of which is incorporated by reference herein.

[0537] The use of RNA or DNA viral based systems for the delivery of nucleic acids take advantage of highly evolved processes for targeting a virus to specific cells in the body and trafficking the viral payload to the nucleus. Viral vectors can be administered directly to patients (in vivo) or they can be used to treat cells in vitro, and the modified cells may optionally be administered to patients (ex vivo). Conventional viral based systems could include retroviral, lentivirus, adenoviral, adeno-associated and herpes simplex virus vectors for gene transfer. Integration in the host genome is possible with the retrovirus, lentivirus, and adeno-associated virus gene transfer methods, often resulting in long term expression of the inserted transgene. Additionally, high transduction efficiencies have been observed in many different cell types and target tissues.

[0538] The tropism of a viruses can be altered by incorporating foreign envelope proteins, expanding the potential target population of target cells. Lentiviral vectors are retroviral vectors that are able to transduce or infect non-dividing cells and typically produce high viral titers. Selection of a retroviral gene transfer system would therefore depend on the target tissue. Retroviral vectors are comprised of cis-acting long terminal repeats with packaging capacity for up to 6-10 kb of foreign sequence. The minimum cis-acting LTRs are sufficient for replication and packaging of the vectors, which are then used to integrate the therapeutic gene into the target cell to provide permanent transgene expression. Widely used retroviral vectors include those based upon murine leukemia virus (MuLV), gibbon ape leukemia virus (GaLV), Simian Immuno deficiency virus (SIV), human immuno deficiency virus (HIV), and combinations thereof (see, e.g., Buchscher et al., J. Virol. 66:2731-2739 (1992); Johann et al., J. Virol. 66:1635-1640 (1992); Sommnerfelt et al., Virol. 176:58-59 (1990); Wilson et al., J. Virol. 63:2374-2378 (1989); Miller et al., J. Virol. 65:2220-2224 (1991); PCT/US94/05700). In applications where transient expression is preferred, adenoviral based systems may be used. Adenoviral based vectors are capable of very high transduction efficiency in many cell types and do not require cell division. With such vectors, high titer and levels of expression have been obtained. This vector can be produced in large quantities in a relatively simple system. Adeno-associated virus (“AAV”) vectors may also be used to transduce cells with target nucleic acids, e.g., in the in vitro production of nucleic acids and peptides, and for in vivo and ex vivo gene therapy procedures (see, e.g., West et al., Virology 160:38-47 (1987); U.S. Pat. No. 4,797,368; WO 93/24641; Kotin, Human Gene Therapy 5:793-801 (1994); Muzyczka, J. Clin. Invest. 94:1351 (1994). Construction of recombinant AAV vectors are described in a number of publications, including U.S. Pat. No. 5,173,414; Tratschin et al., Mol. Cell. Biol. 5:3251-3260 (1985); Tratschin, et al., Mol. Cell. Biol. 4:2072-2081 (1984); Hermonat & Muzyczka, PNAS 81:6466-6470 (1984); and Samulski et al., J. Virol. 63:03822-3828 (1989).

[0539] Packaging cells are typically used to form virus particles that are capable of infecting a host cell. Such cells include 293 cells, which package adenovirus, and w2 cells or PA317 cells, which package retrovirus. Viral vectors used in gene therapy are usually generated by producing a cell line that packages a nucleic acid vector into a viral particle. The vectors typically contain the minimal viral sequences required for packaging and subsequent integration into a host, other viral sequences being replaced by an expression cassette for the polynucleotide(s) to be expressed. The missing viral functions are typically supplied in trans by the packaging cell line. For example, AAV vectors used in gene therapy typically only possess ITR sequences from the AAV genome which are required for packaging and integration into the host genome. Viral DNA is packaged in a cell line, which contains a helper plasmid encoding the other AAV genes, namely rep and cap, but lacking ITR sequences. The cell line may also be infected with adenovirus as a helper. The helper virus promotes replication of the AAV vector and expression of AAV genes from the helper plasmid. The helper plasmid is not packaged in significant amounts due to a lack of ITR sequences. Contamination with adenovirus can be reduced by, e.g., heat treatment to which adenovirus is more sensitive than AAV. Additional methods for the delivery of nucleic acids to cells are known to those skilled in the art. Reference is made to US 2003/0087817, published May 8, 2003, International Patent Application No. WO 2016/205764, published Dec. 22, 2016, International Patent Application No. WO 2018/071868, published Apr. 19, 2018, U.S. Patent Publication No. 2018/0127780, published May 10, 2018, and International Publication No. WO2020/236982, published Nov. 26, 2020, the disclosures of each of which are incorporated herein by reference.

[0540] In various embodiments, the base editor constructs (including, the split-constructs) may be engineered for delivery in one or more rAAV vectors. An rAAV as related to any of the methods and compositions provided herein may be of any serotype including any derivative or pseudotype (e.g., 1, 2, 3, 4, 5, 6, 7, 8, 9, 10, 11, 12, 13, 2/1, 2/5, 2/8, 2/9, 3/1, 3/5, 3/8, or 3/9). An rAAV may comprise a genetic load (i.e., a recombinant nucleic acid vector that expresses a gene of interest, such as a whole or split base editor that is carried by the rAAV into a cell) that is to be delivered to a cell. An rAAV may be chimeric.

[0541] As used herein, the serotype of an rAAV refers to the serotype of the capsid proteins of the recombinant virus. Non-limiting examples of derivatives and pseudotypes include rAAV2/1, rAAV2/5, rAAV2/8, rAAV2/9, AAV2-AAV3 hybrid, AAVrh.10, AAVrh.74, AAVhu.14, AAV3a/3b, AAVrh32.33, AAV-HSC15, AAV-HSC17, AAVhu.37, AAVrh.8, CHt-P6, AAV2.5, AAV6.2, AAV2i8, AAV-HSC15/17, AAVM41, AAV9.45, AAV6(Y445F/Y731F), AAV2.5T, AAV-HAE1/2, AAV clone 32/83, AAVShH10, AAV2 (Y->F), AAV8 (Y733F), AAV2.15, AAV2.4, AAVM41, and AAVr3.45. A non-limiting example of derivatives and pseudotypes that have chimeric VP1 proteins is rAAV2/5-1VP1u, which has the genome of AAV2, capsid backbone of AAV5 and VP1u of AAV1. Other non-limiting example of derivatives and pseudotypes that have chimeric VP1 proteins are rAAV2/5-8VP1u, rAAV2/9-1VP1u, and rAAV2/9-8VP1u.

[0542] AAV derivatives/pseudotypes, and methods of producing such derivatives/pseudotypes are known in the art (see, e.g., Mol. Ther. 2012 April; 20(4):699-708. doi: 10.1038/mt.2011.287. Epub 2012 Jan. 24. The AAV vector toolkit: poised at the clinical crossroads. Asokan A1, Schaffer D V, Samulski R J.). Methods for producing and using pseudotyped rAAV vectors are known in the art (see, e.g., Duan et al., J. Virol., 75:7662-7671, 2001; Halbert et al., J. Virol., 74:1524-1532, 2000; Zolotukhin et al., Methods, 28:158-167, 2002; and Auricchio et al., Hum. Molec. Genet., 10:3075-3081, 2001).

[0543] Methods of making or packaging rAAV particles are known in the art and reagents are commercially available (see, e.g., Zolotukhin et al. Production and purification of serotype 1, 2, and 5 recombinant adeno-associated viral vectors. Methods 28 (2002) 158-167; and U.S. Patent Publication Numbers US20070015238 and US20120322861, which are incorporated herein by reference; and plasmids and kits available from ATCC and Cell Biolabs, Inc.). For example, a plasmid comprising a gene of interest may be combined with one or more helper plasmids, e.g., that contain a rep gene (e.g., encoding Rep78, Rep68, Rep52 and Rep40) and a cap gene (encoding VP1, VP2, and VP3, including a modified VP2 region as described herein), and transfected into a recombinant cells such that the rAAV particle can be packaged and subsequently purified.

[0544] In some embodiments, the base editors can be divided at a split site and provided as two halves of a whole/complete base editor. The two halves can be delivered to cells (e.g., as expressed proteins or on separate expression vectors) and once in contact inside the cell, the two halves form the complete base editor through the self-splicing action of the inteins on each base editor half. Split intein sequences can be engineered into each of the halves of the encoded base editor to facilitate their transplicing inside the cell and the concomitant restoration of the complete, functioning ABE.

[0545] These split intein-based methods overcome several barriers to in vivo delivery. For example, the DNA encoding base editors is larger than the recombinant AAV (rAAV) packaging limit, and so requires different solutions. One such solution is formulating the editor fused to split intein pairs that are packaged into two separate rAAV particles that, when co-delivered to a cell, reconstitute the functional editor protein. Several other special considerations to account for the unique features of base editing are described, including the optimization of second-site nicking targets and properly packaging base editors into virus vectors, including lentiviruses and rAAV.

[0546] Accordingly, the disclosure provides dual rAAV vectors and dual rAAV vector particles that comprise expression constructs that encode two halves of any of the disclosed base editors, wherein the encoded base editor is divided between the two halves at a split site. In some embodiments, the two halves may be delivered to cells (e.g., as expressed proteins or on separate expression vectors) and once in contact inside the cell, the two halves form the complete base editor through the self-splicing action of the inteins on each base editor half. Split intein sequences can be engineered into each of the halves of the encoded base editor to facilitate their transplicing inside the cell and the concomitant restoration of the complete, functioning ABE.

[0547] In various embodiments, the base editors may be engineered as two half proteins (i.e., an ABE N-terminal half and a ABE C-terminal half) by “splitting” the whole base editor as a “split site.” The “split site” refers to the location of insertion of split intein sequences (i.e., the N intein and the C intein) between two adjacent amino acid residues in the base editor. More specifically, the “split site” refers to the location of dividing the whole base editor into two separate halves, wherein in each halve is fused at the split site to either the N intein or the C intein motifs. The split site can be at any suitable location in the base editor, but preferably the split site is located at a position that allows for the formation of two half proteins which are appropriately sized for delivery (e.g., by expression vector) and wherein the inteins, which are fused to each half protein at the split site termini, are available to sufficiently interact with one another when one half protein contacts the other half protein inside the cell.

[0548] Additional methods for the delivery of nucleic acids to cells are known to those skilled in the art. See, for example, US Pub. No. 2003/0087817, incorporated herein by reference.

[0549] It should be appreciated that any base editor, e.g., any of the base editors provided herein, may be introduced into the cell in any suitable way, either stably or transiently. In some embodiments, a base editor may be transfected into the cell. In some embodiments, the cell may be transduced or transfected with a nucleic acid construct that encodes a base editor. For example, a cell may be transduced (e.g., with a virus encoding a base editor), or transfected (e.g., with a plasmid encoding a base editor) with a nucleic acid that encodes a base editor, or the translated base editor. Such transduction may be a stable or transient transduction. In some embodiments, cells expressing a base editor or containing a base editor may be transduced or transfected with one or more gRNA molecules, for example when the base editor comprises a Cas9 (e.g., nCas9) domain. In some embodiments, a plasmid expressing a base editor may be introduced into cells through electroporation, transient (e.g., lipofection) and stable genome integration (e.g., piggybac) and viral transduction or other methods known to those of skill in the art.

### Kits and Cells

[0550] Some aspects of this disclosure provide kits comprising a nucleic acid construct comprising a nucleotide sequence encoding an adenosine deaminase capable of deaminating an adenosine in a deoxyribonucleic acid (DNA) molecule. In some embodiments, the nucleotide sequence encodes any of the adenosine deaminases provided herein. In some embodiments, the nucleotide sequence comprises a heterologous promoter that drives expression of the adenosine deaminase. The nucleotide sequence may further comprise a heterologous promoter that drives expression of the gRNA, or a heterologous promoter that drives expression of the base editor and the gRNA.

[0551] In some embodiments, the kit further comprises an expression construct encoding a guide nucleic acid backbone, e.g., a guide RNA backbone, wherein the construct comprises a cloning site positioned to allow the cloning of a nucleic acid sequence identical or complementary to a target sequence into the guide nucleic acid, e.g., guide RNA backbone.

[0552] The disclosure further provides kits comprising a nucleic acid construct, comprising (a) a nucleotide sequence encoding a napDNAbp (e.g., a Cas9 domain) fused to an adenosine deaminase, or a base editor comprising a napDNAbp (e.g., Cas9 domain) and an adenosine deaminase as provided herein; and (b) a heterologous promoter that drives expression of the sequence of (a). In some embodiments, the kit further comprises an expression construct encoding a guide nucleic acid backbone, (e.g., a guide RNA backbone), wherein the construct comprises a cloning site positioned to allow the cloning of a nucleic acid sequence identical or complementary to a target sequence into the guide nucleic acid (e.g., guide RNA backbone).

[0553] Some embodiments of this disclosure provide cells comprising any of the base editors or complexes provided herein. In some embodiments, the cells comprise nucleotide constructs that encodes any of the base editors provided herein. In some embodiments, the cells comprise any of the nucleotides or vectors provided herein. In some embodiments, the cell is a stem cell. In some embodiments, the cell is a human stem cell, such as a human stem and progenitor cell (HSPC). In some embodiments, the cell is a mobilized (e.g., plerixafor-mobilized) peripheral blood HSPC.

[0554] In some embodiments, a host cell is transiently or non-transiently transfected with one or more vectors described herein. In some embodiments, a cell is transfected as it naturally occurs in a subject. In some embodiments, a cell that is transfected is taken from a subject. In some embodiments, the cell is derived from cells taken from a subject, such as a cell line. A wide variety of cell lines for tissue culture are known in the art. In some embodiments, the cell has been removed from a subject and contacted ex vivo with any of the disclosed base editors, complexes, vectors, or polynucleotides.

[0555] In some embodiments, a host cell is transiently or non-transiently transfected with one or more vectors described herein. In some embodiments, a cell is transfected as it naturally occurs in a subject. In some embodiments, a cell that is transfected is taken from a subject. In some embodiments, the cell is derived from cells taken from a subject, such as a cell line. A wide variety of cell lines for tissue culture are known in the art. Examples of cell lines include, but are not limited to, C8161, CCRF-CEM, MOLT, mIMCD-3, NHDF, HeLa-S3, Huhl, Huh4, Huh7, HUVEC, HASMC, HEKn, HEKa, MiaPaCell, Pancl, PC-3, TF1, CTLL-2, C1R, Rat6, CV1, RPTE, A10, T24, J82, A375, ARH-77, Calu1, SW480, SW620, SKOV3, SK-UT, CaCo2, P388D1, SEM-K2, WEHI-231, HB56, TIB55, Jurkat, J45.01, LRMB, Bcl-1, BC-3, IC21, DLD2, Raw264.7, NRK, NRK-52E, MRCS, MEF, Hep G2, HeLa B, HeLa T4, COS, COS-1, COS-6, COS-M6A, BS-C-1 monkey kidney epithelial, BALB/3T3 mouse embryo fibroblast, 3T3 Swiss, 3T3-L1, 132-d5 human fetal fibroblasts; 10.1 mouse fibroblasts, 293-T, 3T3, 721, 9L, A2780, A2780ADR, A2780cis, A 172, A20, A253, A431, A-549, ALC, B16, B35, BCP-1 cells, BEAS-2B, bEnd.3, BHK-21, BR 293. BxPC3. C3H-10T1/2, C6/36, Cal-27, CHO, CHO-7, CHO-IR, CHO-K1, CHO-K2, CHO-T, CHO Dhfr −/−, COR-L23, COR-L23/CPR, COR-L23/5010, COR-L23/R23, COS-7, COV-434, CML T1, CMT, CT26, D17, DH82, DU145, DuCaP, EL4, EM2, EM3, EMT6/AR1, EMT6/AR10.0, FM3, H1299, H69, HB54, HB55, HCA2, HEK-293, HeLa, Hepalc1c7, HL-60, HMEC, HT-29, Jurkat, J Y cells, K562 cells, Ku812, KCL22, KG1, KYO1, LNCap, Ma-Mel 1-48, MC-38, MCF-7, MCF-10A, MDA-MB-231, MDA-MB-468, MDA-MB-435, MDCK II, MDCK 11, MOR/0.2R, MONO-MAC 6, MTD-1A, MyEnd, NCI-H69/CPR, NCI-H69/LX10, NCI-H69/LX20, NCI-H69/LX4, NIH-3T3, NALM-1, NW-145, OPCN/OPCT cell lines, Peer, PNT-1A/PNT 2, RenCa, RIN-5F, RMA/RMAS, Saos-2 cells, Sf-9, SkBr3, T2, T-47D, T84, THP1 cell line, U373, U87, U937, VCaP, Vero cells, WM39, WT-49, X63, YAC-1, YAR, and transgenic varieties thereof. Cell lines are available from a variety of sources known to those with skill in the art (see, e.g., the American Type Culture Collection (ATCC) (Manassas, Va.)). In some embodiments, a cell transfected with one or more vectors described herein is used to establish a new cell line comprising one or more vector-derived sequences. In some embodiments, a cell transiently transfected with the components of a CRISPR system as described herein (such as by transient transfection of one or more vectors, or transfection with RNA), and modified through the activity of a CRISPR complex, is used to establish a new cell line comprising cells containing the modification but lacking any other exogenous sequence. In some embodiments, cells transiently or non-transiently transfected with one or more vectors described herein, or cell lines derived from such cells are used in assessing one or more test compounds.

[0556] In some aspects, the present disclosure provides uses of any one of the base editors described herein and a guide RNA targeting this base editor to a target A:T base pair in a nucleic acid molecule in the manufacture of a kit for nucleic acid editing, wherein the nucleic acid editing comprises contacting the nucleic acid molecule with the base editor and guide RNA under conditions suitable for the substitution of the adenine (A) of the A:T nucleobase pair with an guanine (G). In some embodiments of these uses, the nucleic acid molecule is a double-stranded DNA molecule. In some embodiments, the step of contacting of induces separation of the double-stranded DNA at a target region. In some embodiments, the step of contacting thereby comprises nicking one strand of the double-stranded DNA, wherein the one strand comprises an unmutated strand that comprises the T of the target A:T nucleobase pair.

[0557] In some embodiments of the described uses, the step of contacting is performed in vitro. In other embodiments, the step of contacting is performed in vivo. In some embodiments, the step of contacting is performed in a subject (e.g., a human subject or a non-human animal subject). In some embodiments, the step of contacting is performed in a cell, such as a human or non-human animal cell.

[0558] The present disclosure also provides uses of any one of the adenine base editors described herein as a medicament. The present disclosure also provides uses of any one of the complexes of adenine base editors and guide RNAs described herein as a medicament.

[0559] It should be appreciated that the foregoing concepts, and additional concepts discussed below, may be arranged in any suitable combination, as the present disclosure is not limited in this respect. Further, other advantages and novel features of the present disclosure will become apparent from the following detailed description of various non-limiting embodiments when considered in conjunction with the accompanying figures.

### EXAMPLES

### Example 1

[0560] PACE is an ideal system for improving the kinetics of an enzyme because variant survival requires that gene III must be expressed before progeny phage are packaged, and before phage are diluted out of the lagoon³⁸ (see FIG. 1A). PACE is ideally suited to evolve a deoxyadenosine deaminase that can mediate deamination at a rate sufficient to enable efficient A•T-to-G•C base editing even when fused to Cas9 or Cas12 homologs that do not reside on DNA as long as SpCas9.

[0561] Following a previous development of a CBE PACE selection³⁸, a new PACE selection was developed that links ABE activity to expression of gene III on the AP (plasmid P1) (FIG. 1B and FIG. 18). ABE was divided into two components, each fused to half of a split intein³⁸. TadA-7.10 fused to a C-intein was encoded in the SP to focus mutagenesis and evolution on the TadA domain, and expressed catalytically dead Cas9 (dCas9) fused to an N-intein from a host-cell plasmid (P2) maintained in bacteria (FIG. 1B and FIG. 18)³⁸. Phage infection followed by intein trans-splicing generates full-length base editor protein, as was previously demonstrated during the development of PACE for CBEs³⁸. Although TadA functions natively as a dimer, the selections were performed for ABE activity using a single TadA-dCas9 fusion, as had done previously in E. coli, since it was presumed that the TadA-dCas9 fusion is able to dimerize either with itself or with endogenous E. coli TadA. It was envisioned that correcting one or more stop codons in a T7 RNA polymerase (T7 RNAP) gene on a third plasmid (P3) using ABE would thereby rescue T7 RNAP production to drive gene III expression from a T7 promoter (FIGS. 1B-1C and FIG. 18). Two stop codons at amino acid positions 57 and 58 in T7 RNAP were installed and provided a single guide RNA (sgRNA) that directs ABE to correct these stop codons on the transcription template strand back to Arg and Gln codons (FIGS. 1B-1C). Eight P3 variants of varying selection stringency were generated that use different promoters and ribosome binding site (RBS) strengths upstream of the T7 RNAP gene (FIG. 18), and then tested overnight propagation of SP encoding TadA-7.10 in host cells harboring P1, P2, and one of eight P3 variants (P3a-h). Phage propagation with host cells containing the least stringent P3 (P3a) was observed, as determined by measuring the number of plaque-forming units (PFU) before and after overnight incubation (FIG. 1D). These results suggest that P1+P2+P3a couples ABE activity to phage propagation, but the low rate of deamination of TadA-7.10 results in only modest gene III expression.

### Example 2

### TadA Evolution

[0562] Next, an attempt was made to evolve TadA-7.10 using this low-stringency phage propagation selection (P1+P2+P3a). Propagation was too weak to support PACE, resulting in phage washout. To overcome this, phage-assisted non-continuous evolution (PANCE)^{6, 29, 37, 39} was utilized.

[0563] PANCE of TadA-7.10 was initiated by infecting host cells harboring P1, P2, and either of the two least stringent P3 variants, P3a or P3b, with SP encoding TadA-7.10 in parallel evolutions (FIGS. 18-19). Genetic diversity was increased by allowing the TadA-7.10 to mutate in the absence of selection pressure during an initial period of “genetic drift”. Host cells were provided with a mutagenic drift plasmid (DP)^{13, 30, 40} that contained anhydrotetracycline (aTc)-inducible gene III. Host cells received aTc during passages 1, 3, and 7, allowing SP to freely diversify without any selection pressure (FIG. 19)³⁰. Phage propagation levels increased in later passages, suggesting that the population had accessed more active TadA variants. Selection stringency was increased by infecting the cells with fewer phage per passage (FIG. 19). After 15 passages on host cells harboring P3a and P3b, the phage pool showed increased activity, propagating overnight about 10,000-fold on host cells harboring P1, P2, and the four least stringent P3 variants (P3a, P3b, P3c, or P3d) and 100-1,000-fold with higher stringency P3 variants P3e and P3f (FIG. 1D). These findings suggest that PANCE with intermittent genetic drift enabled the initial evolution of TadA-7.10.

[0564] To characterize TadA-7.10 mutations that contributed to increased phage propagation during PANCE, 13 individual phage clones were isolated and their TadA-7.10 genes were sequenced. One mutation, T111R, was conserved in all 13 clones (FIG. 2A and FIG. 20). The mutation is predicted to lie near the active site of the enzyme, adjacent to D108N, a critical mutation that emerged early in the initial evolution of TadA-7.10 (FIG. 2B)². The prevalence and location of this mutation suggest that T111R contributes to increased ABE activity.

[0565] TadA-7.10 was continuously evolved from the phage pools that emerged from PANCE passage 15. During this second phase of PANCE experiments, four evolutions in parallel were performed, two on host cells harboring circuits P1, P2, and P3e, and two on host cells harboring P1, P2, and P3g (FIGS. 18-19). Both circuits are more stringent than those used during the initial PANCE experiments. Ten additional passages were completed (FIG. 19), then pooled the resulting phage and tested overnight phage propagation on host cells harboring P1, P2, and P3g. Phage following passage 25 demonstrated additional fitness increases, propagating overnight ˜100-fold on P1+P2+P3g host cells (FIG. 1D). 18 individual phage clones were isolated and their TadA genes were sequenced. PANCE using these more stringent circuits also enriched A109S or A109T (FIGS. 2A-2B and FIG. 20). Given the substantial increase in phage propagation strength after 25 total PANCE passages (surviving in total ˜10⁴⁹-fold dilution), it was decided to initiate PACE on the current phage population to benefit from its more stringent and efficient evolution system.

[0566] PACE was performed in host cells harboring P1, P2, and either P3e or P3g in parallel lagoons with phage pools from passage 25 of PANCE. The lagoon flow rate was gradually increased from 0.5 to 2.5 lagoon vol/h over 84 hours to require that T7 RNAP base editing occur quickly enough to support increasingly rapid phage propagation (FIG. 5). After 84 hours of PACE, an attempt to further increase the stringency by increasing the lagoon flow rate to 3.0 lagoon vol/h was made, but the phage could not propagate further (FIG. 5). Analysis of 21 individual SPs from 84 hours of PACE revealed enrichment of 11 consensus mutations across a variety of unique genotypes: R26G, V69A, V88A, A109S, T111R, D119N, H122N, Y147D, F149Y, T1661, D167N (FIGS. 2A-2B and FIG. 20). Phage emerging from PACE propagated for the first time on host cells harboring P1, P2, and P3h, which together form the most stringent circuit described herein (FIG. 1D). These observations suggest that the PANCE- and PACE-evolved TadA variants evolved greatly improved deoxyadenosine deamination activity.

### Comparison of Evolved TadA Variants

[0567] Five TadA genotypes were selected (TadA-8a, TadA-8b, TadA-8c, TadA-8d, and TadA-8e) emerging from PACE that collectively include all conserved mutations (FIG. 2A and FIG. 20) to characterize in mammalian cells. Unless otherwise noted, all mammalian cell experiments were performed using ABEs with optimized architecture, codon usage, and nuclear localization signals for ABEmax, which consists of the wild-type TadA monomer fused to the evolved TadA monomer, which was fused in turn to the Cas9 nickase domain (TadA-TadA*—Cas9 nickase, FIG. 2C)^{7, 16}. For clarity, hereafter ABEmax¹⁶ is referred to as ABE7.10. The resulting ABE8a-8e variants were tested for base editing activity in HEK293T cells along with ABE7.10¹⁶, which uses TadA-7.10 fused to SpCas9 nickase, and SaABEmax, which uses TadA-7.10 fused to SaCas9 nickase and has modest activity compared with ABEmax⁷. TadA-8a-e variants were also compared with TadA-7.10 for levels of A•T-to-G•C base editing when tethered to catalytically dead LbCas12a (dLbCas12a). Unlike SpCas9 and SaCas9, Cas12a variants that nick the non-edited strand have not been reported due to the lack of separate active sites that cleave each DNA strand in Cas12a⁴¹.

[0568] To select a TadA-8 variant for further studies, each base editor was transfected into HEK293T cells with a sgRNA targeting a site with a cognate PAM for SpCas9 (NGG), SaCas9 (NNGRRT) (SEQ ID NO: 488), or LbCas12a (TTTV) (SEQ ID NO: 489) and sequenced target loci after three days. Strikingly, all five TadA-8 variants demonstrated large improvements in A•T-to-G•C base editing efficiency, up to 9.4-fold, 12-fold, and 24-fold when tethered to SpCas9, SaCas9, and dLbCas12a, respectively, without significant changes to the very low indel formation levels of ABE7.10 (FIGS. 6A-8B). LbCas12a was used in the nuclease inactive form since the desired nickase enzyme for base editing has not been reported. Otherwise, all base editors were optimized with the architecture, codon usage, and nuclear localization signals of ABEmax¹⁶.

[0569] Most notably, efficient A•T-to-G•C base editing activity was observed with dLbCas12a for the first time, despite the lack of a suitable Cas12a nickase to nick the non-edited strand, which greatly increases base editing efficiency¹. Because ABEs containing TadA-8e showed consistently high editing activity and low indel formation, particularly when fused with dLbCas12a, base editors containing TadA-8e were chosen for subsequent analyses.

[0570] ABE variants were reported to exhibit comparable deamination activity with and without the wild-type TadA monomer in their architectures⁴². It was confirmed that eliminating the wild-type TadA from the wtTadA-TadA-8e-Cas fusion did not affect base editing activity with SpCas9, SaCas9, or dLbCas12a (FIGS. 9A-11B). In all subsequent analyses, ABEs were evaluated as simple TadA-8e-Cas variants, without the wild-type TadA monomer, hereafter referred to as ABE8e variants (FIG. 2C).

### Characterization of ABE8e

[0571] To determine if PANCE and PACE resulted in improved deamination kinetics, the DNA adenosine deamination kinetics of ABE7.10 and ABE8e were compared in vitro. Recombinant ABE7.10 and ABE8e was purified through His-tag column chromatography, high-resolution heparin-affinity chromatography, and size-exclusion chromatography. Single-turnover DNA deamination assays were performed by measuring A to I conversion in vitro to determine their apparent deamination rate constants (kₐₚₚ). Remarkably, kₐₚₚ of deoxyadenosine deamination is 590-fold higher for ABE8e than for ABE7.10 (0.59±0.034 min⁻¹ for ABE8e versus 0.0010±0.00030 min⁻¹ for ABE7.10) (FIG. 2D). The dramatically increased rate of deoxyadenosine deamination by ABE8e compared to ABE7.10 suggests that TadA-8e may be fast enough to yield efficient DNA adenosine deamination even when coupled to non-SpCas9 Cas effectors that have residence times on DNA substrates. These results establish that PANCE and PACE of TadA-7.10 resulted in a highly evolved TadA variant that mediates very efficient and fast deoxyadenosine deamination.

[0572] To begin to test the possibility that evolved TadA-8e may expand the targeting capabilities of adenine base editing, HEK293T cells were treated with SpABE8e, SaABE8e, LbABE8e, enAsABE8e, or the corresponding ABE7.10 variants targeting several endogenous genomic sites each and measured A:T-to-G:C base conversion efficiency after three days (FIG. 2E and FIGS. 9A-11B). With all four Cas homologs, substantially enhanced editing with the ABE8e variant compared to the ABE7.10 variant was observed. For SpABE variants, the increased editing efficiency of SpABE8e editors was most evident when examining the editing levels at the second-most efficiently edited A within each protospacer. With SpABE7.10, editing levels at the second-most edited A ranged from 1.7% to 20%, while with SpABE8e editing levels ranged from 18% to 86%, improvements of 3.0- to 11-fold.

[0573] ABE8e variants based on SaCas9 and on two Cas12a homologs showed large increases in editing levels. For SaABE7.10, A:T-to-G:C conversion at the highest editing position ranged from 3.6±1.1% to 26±5.1% at the five genomic loci tested, while for SaABE8e, A•T-to-G•C conversion at the highest editing position ranged from 33±5.8% to 69±11% (FIG. 2E). For Cas12a homologs, no nickase for the unedited strand is known. Therefore, base editors with dead LbCas12a and enAsCas12a (an engineered AsCas12a) were analyzed. Strikingly, average LbCas12a-mediated adenine base editing increased from 2.9% average editing for LbABE7.10 to 24% average editing (and as high as 46±5.0%) for LbABE8e, and average enAsCas12a-mediated editing increased 59-fold from 0.31% with enAsABE7.10 to 18% (and as high as 29±0.51%) for enAsABE8e at the mostly highly edited position within each protospacer (FIG. 2E)⁹.

[0574] Next, the base editing window of ABE8e variants was examined. The editing windows for SpCas9-derived ABE7.10 are slightly narrower (typically, protospacer positions 4-7, counting the PAM as positions 21-23) than the editing windows for canonical SpCas9 CBEs³⁸. Editing windows of ABE8e variants are now consistent with those of the corresponding CBEs: positions 4-8 for SpABE8e, 3-14 for SaABE8e, and 8-14 for both LbABE8e and enAsABE8e (FIGS. 9A-11B). These results collectively demonstrate that ABE8e variants can efficiently edit positions that were previously challenging to target with ABE7.10.

### Example 3

[0575] To further expand the targeting scope of ABEs caused by modest compatibility with alternative PAM Cas9 variants, ABE8e variants with Cas9 variants previously engineered or evolved to be compatible with alternative PAM sequences were generated, including SpCas9-NG (PAM=NGN)¹¹ (SEQ ID NO: 490) and SaCas9-KKH (PAM=NNNRRT)⁷ (SEQ ID NO: 491). Each variant was tested in HEK293T cells at five or more endogenous genomic sites each and measured A•T-to-G•C conversion after three days (FIG. 2F, FIGS. 10A-10B, and FIGS. 12A-13B). Compared to the corresponding ABE7.10 variants, NG-ABE8e and SaKKH-ABE8e demonstrated increased editing efficiencies (FIG. 2F, FIGS. 10A-10B, and FIGS. 12A-13B). For NG-ABEs, the 11 most highly edited adenines across five genomic sites were analyzed. While A•T-to-G•C conversion levels were similar between NG-ABE7.10 and NG-ABE8e at four of the 11 target adenines, at the other seven target adenines, NG-ABE8e was substantially (up to 28-fold) more efficient (FIG. 2F). Similarly, SaKKH-ABE8e supported increased editing efficiencies (37-78% at the most highly edited position) at all tested adenines at each of the nine loci tested compared with SaKKH-ABE7.10 (12-45% at the most highly edited position) (FIG. 2F). These data collectively show that TadA-8e is broadly compatible with diverse Cas9 and Cas12 homologs, greatly expanding the targeting scope of adenine base editors.

[0576] The use of circularly permuted Cas9 variants in base editors alters the position of base editing activity windows. It has been previously demonstrated that the editing windows of ABEs using circularly permuted Cas9 variants are broadened from protospacer positions 4-7 for canonical ABE7.10 to positions 4-11 for the circularly permuted variants. Circularly permuted CP1028-ABE8e and CP1041-ABE8e were constructed, and observed further expansion of the editing window to protospacer positions 3-14 (FIG. 2G and FIGS. 9A-9B) was observed. Increased editing was also observed at the boundaries of the editing window. From protospacer positions 9-14, which lie outside the canonical editing window of ABEs, base editing efficiency across seven tested genomic loci increased an average of 2.9- and 2.5-fold with CP1028-ABE8e and CP1041-ABE8e, respectively, compared to the corresponding ABE7.10 variants, without significant changes in indel frequencies (FIG. 2G and FIGS. 9A-9B). Together, circularly permuted ABE8e variants and non-canonical PAM ABE8e variants expand the targeting scope of efficient adenine base editing.

[0577] Next, an understanding of the differences in the processivity between ABE8e and ABE7.10 was sought. Enhanced processivity is useful for some applications such as the disruption of regulatory regions or genetic screens driven by base editing. The processivity of ABEs was assessed at genomic sites 5, 6, and 7 by calculating the number of alleles containing multiple A•T to G•C edits within the editing window. At these three sites, the frequency of alleles with multiple base conversions increase 11- to 17-fold for ABE8e relative to ABE7.10, respectively. (FIG. 14). These data suggest that ABE8e is particularly useful when multiple A•T-to-G•C conversions at a single locus are desired.

### Off-Target Analysis of ABE8e

[0578] Off-target activity of ABE8e in HEK293T cells was analyzed at known off-target sites previously reported for either ABEs or for Cas9 nuclease^{43, 44}. The top three known ABE off-target sites were tested for site 5 (HBG) and site 6 (VEGFA3) as identified by EndoV-Seq⁴³, and for EMX1 as identified by GUIDE-seq⁴⁴. An increase in editing was observed at six of the nine off-target sites when comparing ABE8e to ABE7.10, but the ratio of on-target to off-target editing was comparable at all but two sites (FIG. 3A). At the top three EMX1 off-targets sites⁴⁴, similar levels of editing were observed for ABE8e (averaging 74±3.0%, 58±4.9%, and 5.9±4.8% at the top three off-target sites, respectively) and Cas9 nuclease (averaging 81±2.2%, 48±4.9%, and 6.0±1.0%, respectively) (FIG. 15). Given the previous observations that off-target base editing is greatly reduced when delivering the base editor as protein-RNA (RNP) complexes⁴⁵, both on-target and off-target base editing with ABE8e RNP delivery were examined. RNP delivery of ABE8e purified from E. coli resulted in similar levels of on-target editing at, but much lower editing levels at the nine off-target sites, and thus a dramatic increase in on-target:off-target editing ratios (up to 1,300-fold) at every off-target site analyzed (FIG. 3A). A 1,300-fold increase in on-target:off-target editing ratios was observed at the EMX1 target, and a roughly 90-fold increase in on-target:off-target editing ratios was observed at the clinically relevant HBG target. Thus, for applications in which off-target editing must be minimized, the use of ABE8e RNP delivery is recommended.

[0579] ABE7.10 has previously been shown to cause a low-level increase in deamination of adenines in cellular RNA, which can be minimized by introducing mutations in the TadA domains that decrease RNA editing but preserve DNA editing^{42, 46-48} To measure the extent of cellular RNA editing by ABE8e, HEK293T cells were treated with plasmids encoding ABE7.10, ABE8e, or Cas9 (D10A) nickase and a guide RNA targeting LDLR, then measured the A-to-I mutation frequency across the entire transcriptome. Consistent with previous reports^{42, 46, 47}, a modest increase in transcriptome-wide RNA editing was detected with ABE7.10 compared to the Cas9 (D10A) control, with A-to-I conversions increasing from 0.19±0.017% for Cas9 (D10A) to 0.24±0.0066% for ABE7.10. ABE8e induced additional transcriptome-wide A-to-I conversion to 0.35±0.010%. To reduce RNA editing by ABE8e, mutations were installed that had been previously reported to minimize RNA editing of ABEs^{42, 47}, and transcriptome-wide A-to-I RNA editing levels were measured. Three ABE8e mutants were tested: ABE8e(TadA-8e V106W)⁴⁷, ABE8e(TadA-8e V82G)⁴², and ABE8e(TadA-8e K20A R21A)⁴². ABE8e(TadA-8e V106W) resulted in the greatest reduction in RNA editing levels, decreasing the transcriptome-wide A-to-I conversion level to 0.25±0.011% (FIG. 3B). On-target editing at the most efficiently edited protospacer position was similar among all of the tested mutants to that of ABE8e (FIG. 3B). The use of ABE8e(TadA-8e V106W) for applications that require minimizing off-target RNA editing is recommended.

[0580] Next, the ability of ABE8e to mediate Cas9-independent off-target DNA editing was characterized. A recently developed orthogonal R-loop assay⁵¹⁴ was used to detect the propensity of base editors to edit single-stranded DNA regions unrelated to their target loci with much greater sensitivity and lower cost than assays that require whole-genome sequencing (FIG. 3D). HEK293T cells were co-transfected with plasmids encoding an SpABE variant and an on-target sgRNA for SpABE, along with a catalytically inactive SaCas9 (dSaCas9) and an SaCas9 sgRNA targeting a genomic locus unrelated to the SpABE on-target site. Base editing levels within these dSaCas9-generated R-loops were previously correlated with the propensity for Cas9-independent off-target editing in mammalian cells⁵¹.

[0581] Using this assay, A•T-to-G•C base conversion levels were compared in five dSaCas9 R-loops for ABE7.10 and ABE8e, observing an increase in off-target editing at these orthogonal R-loops, ranging from 0.079%-0.32% with ABE7.10 to 1.9%-6.7% with ABE8e (FIG. 3E, FIG. 27). To reduce Cas9-independent off-target DNA editing, we performed the same analysis with ABE8e (TadA-8e V106W), resulting in a substantial decrease in off-target editing at these orthogonal R-loops of 0.32%-1.3% (FIG. 3E, FIG. 27). These data indicate that Cas9-independent off-target editing increases with ABE8e as expected given its higher activity, but can be ameliorated by introducing the V106W mutation into TadA-8e, which likely reduces affinity of TadA-8e for both DNA and RNA, thereby increasing its dependence on Cas9 for substrate engagement.

### Example 4: Disease Application of ABE8e Base Editors: HBG and BLCL11A Editing

[0582] Two sites were targeted to install mutations known to induce the upregulation of fetal hemoglobin, a promising approach to treat hemoglobinopathies such as sickle cell disease and β-thalassemia⁴⁹. First, ABE8e editing was assessed at an erythroid enhancer of BCL11A, which encodes a transcriptional repressor that silences fetal hemoglobin in adult erythroid cells. Mutations in a GATA1 binding site at the +58 BCL11A erythroid enhancer lead to decreased BCL11A expression and fetal hemoglobin induction⁵⁰⁻⁵². The ability of ABE7.10 and ABE8e to install two A•T-to-G•C edits in the GATA1 binding site at positions 4 and 7 within a single protospacer in HEK293T cells was compared. Simultaneous editing of both target adenines was observed in 54.4±12.5% of alleles following cellular treatment with ABE8e compared to only 7.9±3.4% of alleles following treatment with SpABE7.10 (FIG. 4A and FIG. 16).

[0583] ABE8e was also applied to install two naturally-occurring A•T-to-G•C single-nucleotide polymorphisms (SNPs) present in the promoters of the HBG1 and HBG2 fetal hemoglobin genes⁴⁹. Each of these SNPs confer a hereditary persistence of fetal hemoglobin phenotype, which may alleviate symptoms of hemoglobinopathies⁵³. The target adenines are located at HBG promoter positions −198 and −175, and their base editing requires two guide RNAs since they are separated by 23 nucleotides. HEK293T cells were treated with ABE7.10 or ABE8e and each guide RNA separately, and moderate increases in editing at both sites with ABE8e were observed (FIG. 4B). Although each SNP individually increases the expression of fetal hemoglobin, editing both SNPs simultaneously might further augment fetal hemoglobin levels. When both guide RNAs were delivered simultaneously with ABE7.10, combined editing at both HBG promoter positions of only 5.1±0.9% within a single allele was observed (FIG. 4B and FIG. 17). In contrast, 24±2.2% of HBG alleles containing both edits with ABE8e were observed, a 4.8-fold increase (FIG. 4B and FIG. 17).

[0584] An increased percentage of alleles simultaneously containing A:T-to-G:C editing at positions −195 and −175 was observed after treatment with ABE8e compared to ABE7.10. Multiple edits are predicted to more effectively lead to the expression of fetal hemoglobin⁴⁹. These results suggest that ABE8e is especially well suited for multiplexed base editing applications.

### Discussion

[0585] Collectively, these results demonstrate the ability of PANCE and PACE to evolve an adenine base editor with 590-fold improved deamination kinetics that support efficient base editing using a much larger set of Cas9 and Cas12a homologs than was previously possible. The newly evolved TadA-8e supports efficient adenine base editing when fused with every Cas protein tested—SpCas9, SaCas9, LbCas12a, enAsCas12a, SpCas9-NG, SaCas9-KKH, SpCas9-CP1028, SpCas9-CP1041, and SpCas9-NG-CP1041—to mediate efficient A•T-to-G•C base conversions. The improved kinetics, editing efficiency, and targeting scope of ABE8e variants enabled efficient simultaneous base editing to install two mutations in a GATA1 binding site of a BCL11A enhancer, or two mutations in the promoter of HBG genes, all of which are known to increase fetal hemoglobin expression. ABE8e substantially advances the capabilities of adenine base editors by expanding their targeting scope, efficiency, and suitability for demanding base editing applications.

### Methods

### General Methods and Molecular Cloning

[0586] Antibiotics were used at the following working concentrations: carbenicillin, 50 μg/mL; spectinomycin, 50 μg/mL; chloramphenicol, 40 μg/mL; and kanamycin, 30 μg/mL. Nuclease-free water (ThermoFisher Scientific) was used for PCR reactions and cloning. For all other experiments, water was purified using a MilliQ purification system (Millipore). Phusion U Green Multiplex PCR Master Mix (ThermoFisher Scientifc) was used for all PCRs.

[0587] Plasmids were cloned by uracil-specific excision reagent (USER) assembly, Golden Gate assembly, or KLD cloning following manufacturer's instructions. For USER cloning, 42-60° C. melt temperature junctions were used, and constructs were assembled by digesting at 37° C. for 45 minutes followed by transformation into chemically competent cells. For Golden Gate assembly, Lgul (Sapl isoschizomer, Life Technologies) was used as the type IIS restriction enzymes along with T4 DNA ligase (New England BioLabs). Typical assemblies contained final concentrations of ˜0.5-2 ng per kb per μL plasmids, with a ˜2:1 ratio of donor to acceptor plasmids. Assemblies were incubated at 37° C. for between 1 hour and 18 hours followed by transformation into chemically competent cells. Guide RNA plasmids were assembled following the manufacturer's instructions with KLD enzyme mix (New England BioLabs).

[0588] Codon-optimized sequences for human cell expression were obtained from Genscript. Plasmids were cloned and amplified using Mach1 T1^{R} competent cells (ThermoFisher Scientific). Plasmid DNA was isolated using the Qiagen Spin Miniprep Kit and Qiagen Midiprep Kit according to the manufacturer's instructions. All constructs assembled using PCR were fully sequence-verified using Sanger sequencing (Quintara Biosciences), while constructs assembled using Golden Gate cloning were sequence-verified across all assembly junctions. Protospacer sequences for guide RNA plasmids are described in FIG. 21. The amino acid sequences for codon-optimized, bis-bpNLS base editor variants are listed in Sequence section below.

### Preparation and Transformation of Chemically Competent Cells

[0589] Strain S2060³³ was used in all experiments, including phage propagation tests, PANCE, and PACE. Chemically competent cells were prepared as described³⁸, unless otherwise noted. Briefly, an overnight culture was diluted 50-fold into 2×YT media and grown at 37° C. with shaking at 230 r.p.m. to an optical density (0D600) of around 0.4-0.5. Cells were cooled on ice and pelleted by centrifugation at 4,000 g for 10 minutes at 4° C. The cell pellet was then resuspended by gentle stirring in ice-cold TSS solution (LB media supplemented with 5% v/v DMSO, 10% w/v PEG 3350, and 20 mM MgCl2). The cell suspension was mixed thoroughly, aliquoted and frozen in a dry ice/acetone bath, then stored at −80° C. until use. To transform cells, 100 μl of competent cells thawed on ice was added to a plasmid(s) and 100 μl KCM solution (100 mM KCl, 30 mM CaCl2, and 50 mM MgCl2 in water). The mixture was heat shocked at 42° C. for 60 seconds and SOC media (200 μL) was added. Cells were allowed to recover at 37° C. with shaking at 230 r.p.m. for 1 hour, then spread on LB media with 1.5% agar (United States Biologicals) plates containing the appropriate antibiotic(s) and incubated at 37° C. for 16-18 hours.

### Plaque Assays for Phage Titer Quantification

[0590] Phage were plagued on S2060³³ E. coli host cells containing plasmid pJC175e (activity-independent propagation)¹² or plasmid pT7-AP13 (to check for the presence of T7 RNAP recombinants)¹². To prepare a cell stock for plaquing, overnight culture of host cells (fresh or stored at 4° C. for up to −1 week) was diluted 50-fold in 2×YT media containing appropriate antibiotic(s) and grown at 37° C. to an OD₆₀₀ of 0.5-0.8. Serial dilutions of phage (ten-fold) were made in PBS buffer (pH 7.4) or water. To prepare plates, molten 2×YT medium agar (1.5% agar, 55° C.) was mixed with Bluo-gal (10% w/v in DMSO) to a final concentration of 0.04% Bluo-gal. The molten agar mixture was pipetted into quadrants of quartered Petri dishes (1.5 mL per quadrant) or wells of a 12-well plate (˜1 mL per well) and allowed to set. To prepare top agar, a 2:1 mixture of 2×YT media and molten 2×YT medium agar (1.5%, 0.5% agar final) was prepared. Top agar was maintained tightly capped at 55° C. for up to 1 week. To plaque, cell stock (50-100 μL) and phage (10 μL) were mixed in 2 mL library tubes (VWR International), and 55° C. top agar added (400 or 1,000 μL for 12-well plate or Petri dish, respectively) and mixed one time by pipetting up and down, and then the mixture was immediately pipetted onto the solid agar medium in one well of a 12-well plate or one quadrant of a quartered Petri dish. Top agar was allowed to set undisturbed (10 minutes at room temperature), then plates or dishes were incubated (without inverting) at 37° C. overnight. Phage titer were determined by quantifying blue plaques.

### Phage Propagation Assays

[0591] S2060 cells containing plasmids of interest were prepared as described above and inoculated in Davis Rich Medium (DRM) (prepared from US Biological CS050H-001/CS050H-003). Host cells from an overnight culture in DRM were diluted 50-fold into fresh DRM and grown for ˜1.5 hours at 37° C. Previously titered phage stocks were added to 2 mL of bacterial culture at a final concentration of 105 plaque forming units mL⁻¹. The cultures were grown overnight with shaking at 37° C. and then centrifuged (3,600 xg, 10 minutes) to remove cells. The supernatants were titered by plaquing as described above. Fold enrichment was calculated by dividing the titer of phage propagated on host cells by the titer of phage at the same input concentration shaken overnight in DRM without host cells.

### PANCE Experiments

[0592] Chemically competent host cells were transformed with DP6⁴⁰ and plated on 2×YT agar containing 0.5% glucose (w/v) along with appropriate concentrations of antibiotics. Five colonies were diluted in DRM with the appropriate antibiotics, grown to OD₆₀₀ 0.5-0.6, and treated with 40 mM arabinose to induce mutagenesis and the desired amount of anhydrotetracycline for a given passage (0 or 40 ng/mL). Treated cultures were split into the desired number of either 2 mL cultures in single culture tubes or 500 μL cultures in a 96-well plate and infected with selection phage. Infected cultures were grown overnight at 37° C. and harvested the next day via centrifugation (3000 g for 10 minutes). Supernatant containing evolved phage was isolated and stored at 4° C. Isolated phage were then used to infect the next passage and the process repeated for the desired number of selection passages for the selection. For phage dilutions, see FIG. 19. Phage titers were determined by plaquing as described above. Phage genotypes were assessed from pool samples or single plaques by diagnostic PCR using primers BT-52F (5′-GTCGGCGCAACTATCGGTATCAAGCTG (SEQ ID NO: 310)) and BT-52R2 (5′-AGTAAGCAGATAGCCGA ACAAAGTTACCAGAAGGAAAC (SEQ ID NO: 311)), and the PCR products were assessed by Sanger sequencing.

### PACE Experiments

[0593] Unless otherwise noted, PACE apparatus, including lagoons, chemostats, pumps and media, were prepared and used as previously described³⁹. Host cells were prepared as described for PANCE above. Five colonies were diluted into 5 mL DRM with the appropriate antibiotics and grown to OD₆₀₀ 0.4-0.8, which was then used to inoculate a chemostat (60 mL), which was maintained under continuous dilution with fresh DRM at 1-1.5 volumes per hour to keep cell density roughly constant. Lagoons were initially filled with DRM, then continuously diluted with chemostat culture for at least 2 hours before seeding with phage.

[0594] Stock solution of arabinose (1 M) was pumped directly into lagoons (10 mM final) as previously described³⁹ for 1 hour before the addition of phage. For the first 12 hours after phage inoculation, anhydrotetracycline (aTc) was present in the stock solution (3.3 μg/mL). Syringes containing aTc solution were covered in aluminum foil, and work was conducted to minimize light exposure of tubing and lagoons.

[0595] Lagoons were seeded at a starting titer of ˜10⁷ pfu per mL. Dilution rate was adjusted by modulating lagoon volume (5-20 mL) and/or culture inflow rate (10-20 mL/h). Lagoons were sampled at indicated times (usually every 24 hours) by removal of culture (500 μL) by syringe through the waste needle. Samples were centrifuged at 13,500 g for 2 minutes and the supernatant removed and stored at 4° C. Titers were evaluated by plaquing as described above. The presence of T7 RNAP or gene III recombinant phage was monitored by plaquing on 52060 cells containing pT7-AP and no plasmid. Phage genotypes were assessed from single plaques by diagnostic PCR as described in the PANCE section.

### Cell Culture

[0596] HEK293T cells (ATCC CRL-3216) were cultured in Dulbecco's modified Eagle's medium (Corning) supplemented with 10% fetal bovine serum (ThermoFisher Scientific) and maintained at 37° C. with 5% CO₂.

### Transfections

[0597] HEK293T cells were seeded at 50,000 cells per well on 48-well poly-D-lysine plates (Corning) in the same culture medium. Cells were transfected 24-30 hours after plating with 1.5 μL Lipofectamine 2000 (ThermoFisher Scientific) using 750 ng base editor plasmid, 250 ng guide RNA plasmid and 20 ng green fluorescent protein as a transfection control following the manufacturer's instructions. When targeting HBG1/2 and BCL11A sites with plasmid DNA, 150 ng of base editor plasmid and 50 ng of guide RNA plasmid was complexed with 1 μL of Lipofectamine 3000. Cells were cultured for 3 days, then washed with 1× PBS (ThermoFisher Scientific), followed by genomic DNA extraction by addition of 100 μL freshly prepared lysis buffer (10 mM Tris-HCl, pH 7.5, 0.05% SDS, 25 μg/mL proteinase K (ThermoFisher Scientific)) directly into each transfected well. The mixture was incubated at 37° C. for 1 hour then heat inactivated at 80° C. for 30 minutes. Genomic DNA lysate was subsequently used immediately for high-throughput sequencing (HTS).

### Orthogonal R-Loop Assay

[0598] Orthogonal R-loop assays to measure off-target editing were performed as previously described⁵¹, with minor modifications. Under standard conditions, 200 ng of SpCas9 sgRNA plasmid, 200 ng of SaCas9 sgRNA plasmid, 300 ng of base editor plasmid, and 300 ng of dSaCas9 plasmid were co-transfected into HEK293T cells using 1.5 μL of Lipofectamine 2000. For these transfection experiments, cells were cultured for 3 days, then washed with 1× PBS (ThermoFisher Scientific), followed by genomic DNA extraction by addition of 100 μL freshly prepared lysis buffer (10 mM Tris-HCl, pH 7.5, 0.05% SDS, 25 μg/mL proteinase K (ThermoFisher Scientific)) directly into each transfected well. The mixture was incubated at 37° C. for 1 hour then heat inactivated at 80° C. for 30 minutes. Genomic DNA lysate was used immediately for high-throughput sequencing (HTS).

### Protein Purification for In Vitro Studies

[0599] SpABE7.10 and SpABE8e, which were used in in vitro deamination assays, were cloned into a pBR322 plasmid. The cloned constructs contain an N-terminal His6-tag. The proteins were expressed in E. coli strain BL21 Rosetta 2 (DE3) (EMD Biosciences) and purified as described previously⁵⁴ with a few alterations. The cells were lysed via sonication in 30 mM HEPES pH 8.0, 1 M KCl, 2 mM TCEP, 10% (v/v) glycerol, 0.5% Triton X-100, and 10 mM imidazole buffer supplemented with protease inhibitor cocktail (Roche). The proteins were purified in several steps. First, clarified lysates were loaded onto a HisTrap FF column (GE Healthcare) and proteins were eluted with a gradient of lysis buffer supplemented with up to 300 mM imidazole. Next, the eluted proteins were separated from non-specific nucleic acids using heparin HiTrap column (GE Healthcare) and eluted with a linear gradient of 100 mM to 1 M KCl. Finally, the proteins were further purified by size-exclusion chromatography using a Superdex 200 16/60 column and 20 mM HEPES pH 7.5, 400 mM KCl, 2 mM TCEP, 10% (v/v) glycerol buffer. The eluted proteins were concentrated to ˜10 mg/mL.

### Single Turnover In Vitro Deamination Assay

[0600] A single guide RNA (5′-GUUCACCUUUCUUUGUCUGUGUUUUAGAGCUAGAAAUAGCAAGUUAAAAUAAGG CUAGUCCGUUAUCAACUUGAAAAAGUG-3′ (SEQ ID NO: 312)) was transcribed in vitro using synthetic DNA oligonucleotides (IDT) containing a T7 promoter sequence. The sgRNA was purified by 12% polyacrylamide gel electrophoresis (PAGE), then extracted from the gel using the crush-and-soak method followed by ethanol precipitation and dephosphorylated using rSAP (New England Biolabs).

[0601] For in vitro deamination assays, 10 pmol of DNA oligonucleotide (non-target strand which contains a single adenine 5′-GTTCGGTGGCTCCGTCCGTGTTCACCTTTCTTTGTCTGTGGGCGTTTTGGTTGCTCTTC G-3′ (SEQ ID NO: 313)) was 5′-radiolabeled using [γ-³²P] ATP (PerkinElmer) and 5 units of T4 polynucleotide kinase (New England Biolabs) in 1′ T4 PNK buffer (New England Biolabs) at 37° C. for 30 minutes. The labeling reaction was purified using an Illustra™ MicroSpin G-25 column (GE Life Sciences) to remove free nucleotides. The dsDNA substrates were prepared by annealing the 5′-radiolabeled non-target strand and an excess of unlabeled target strand (5′-CGAAGAGCAACCAAAACGCCCACAGACAAAGAAAGGTGAACACGGACGGAGCCAC CG AAG-3′ (SEQ ID NO: 314)).

[0602] The SpABE7.10+sgRNA and SpABE8e+sgRNA RNP complexes were prepared by mixing the sgRNA and appropriate SpABE in a 1.5:1 molar ratio in RNP assembly buffer (20 mM Tris-HCl pH 7.5, 200 mM KCl, 5% (v/v) glycerol, 5 mM MgCl2, 2 mM DTT) and incubating at room temperature for 20 min.

[0603] The deamination reactions containing 1 μM RNPs in deamination buffer (20 mM Tris-HCl pH 7.5, 100 mM KCl, 5% (v/v) glycerol, 2.5 mM MgSO₄, 2 mM DTT) were initiated by adding 5′-radiolabeled dsDNA to a final concentration of 1 nM, then incubated at 37° C. 20 μL aliquots were removed at the 0, 1, 3, 8, 23, and 32 hours in case of SpABE7.10 and at the 0, 1, 2, 5, 10, 20, and 60 minutes in case of SpABE8e. The reactions were quenched by mixing them with 30 μL of hot water and incubating them at 95° C. for 2 minutes. The reactions were then purified using Monarch PCR & DNA Cleanup kit (New England Biolabs). To detect adenosine deamination, eluted DNA was incubated with 20 units of E. coli Endonuclease V (EndoV) in 1′ NEB4 buffer at 37° C. for 1 hour. EndoV specifically recognizes deaminated adenosine (inosine) in dsDNA and ssDNA and cleaves DNA one nucleotide downstream of the modification site^{43, 55, 56}. After cleavage by EndoV, the samples were mixed with an equal volume of formamide gel loading buffer (95% formamide, 100 mM EDTA, 0.025% SDS, and 0.025% (w/v) bromophenol blue), heated at 95° C. for 2 minutes, resolved on 15% denaturing polyacrylamide gel, and visualized by phosphorimaging. Assays were performed in three independent replicates, and the intensities of the uncleaved and cleaved DNA were analyzed using ImageQuant TL Software (GE Healthcare). Apparent rates were calculated by a fit to a single exponential decay (Prism7, GraphPad).

### Protein Purification for RNP Delivery to Mammalian Cells

[0604] ABE8e was codon optimized for bacterial expression and cloned into the protein expression plasmid pD881-SR (Atum, Cat. No. FPB-27E-269). The expression plasmid was transformed into BL21 Star DE3 competent cells (ThermoFisher, Cat. No. C601003). Colonies were picked for overnight growth in Terrific Broth (TB) with 25 ug/mL kanamycin and grown overnight with shaking at 37° C. The next day, 2 L of pre-warmed TB were inoculated with overnight culture at a starting OD₆₀₀ of 0.05. Cells were shaken at 37° C. for about 2.5 hours until the OD₆₀₀ was ˜1.5. Cultures were cold shocked in an ice-water slurry for 1 hour, following which D-rhamnose was added to a final concentration of 0.8% (w/v). Cultures were then incubated at 18° C. with shaking for 24 hours to induce. Following induction, cells were pelleted and flash-frozen in liquid nitrogen and stored at −80° C. The next day, cells were resuspended in 30 mL cold lysis buffer (1 M NaCl, 100 mM Tris-HCl pH 7.0, 5 mM TCEP, 20% glycerol, with 5 tablets of complete, EDTA-free protease inhibitor cocktail tablets (Millipore Sigma, Cat. No. 4693132001)). Cells were passed 3 times through a homogenizer (Avestin Emulsiflex-C3) at ˜18,000 psi for lysis. Cell debris was pelleted for 20 min using a 20,000xg centrifugation at 4° C. Supernatant was collected and spiked with 40 mM imidazole, followed by a 1 hour incubation at 4° C. with 1 mL of Ni-NTA resin slurry (G Bioscience Cat. No. 786-940, prewashed once with lysis buffer). Protein-bound resin was washed twice with 12 mL of lysis buffer in a gravity column at 4° C. Protein was eluted in 3 mL of elution buffer (300 mM imidazole, 500 mM NaCl, 100 mM Tris-HCl pH 7.0, 5 mM TCEP, 20% glycerol). Eluted protein was diluted in 40 mL of low-salt buffer (100 mM Tris-HCl, pH 7.0, 5 mM TCEP, 20% glycerol) just before loading into a 50 mL Akta Superloop for ion exchange purification on the Akta Pure25 FPLC. Ion exchange chromatography was conducted on a 5 mL GE Healthcare HiTrap SP HP pre-packed column (Cat. No. 17115201). After washing the column with low salt buffer, the diluted protein was flowed through the column to bind. The column was then washed in 15 mL of low salt buffer before being subjected to an increasing gradient to a maximum of 80% high-salt buffer (1 M NaCl, 100 mM Tris-HCl, pH 7.0, 5 mM TCEP, 20% glycerol) over the course of 50 mL, at a flow rate of 5 mL/min. 1 mL fractions were collected during this ramp to high-salt buffer. Peaks were assessed by SDS-PAGE to identify fractions containing the desired protein, which were concentrated first using an Amicon Ultra 15 mL centrifugal filter (100-kDa cutoff, Cat. No. UFC910024), followed by a 0.5 mL 100 kDa cutoff Pierce concentrator (Cat. No. 88503). Concentrated protein was quantified using a BCA assay (ThermoFisher, Cat. No. 23227); the stock concentration was 3.8 mg/mL.

### Protein Nucleofection

[0605] Nucleofection was conducted as per manufacturer's recommendations using a Lonza 4D nucleofector and the Lonza SF Cell Line 4D-Nucleofector X Kit S (Cat No. V4XC-2032). After formulating the SF nucleofection buffer, 200,000 cells were resuspended in 5 μL of buffer per nucleofection. In the remaining 15 μL of buffer per nucleofection, 20 pmol of chemically-modified sgRNA from Synthego was combined with 18 pmol of ABE8e protein and incubated 5 min at room temperature to complex. Cells were added to the 20 μL nucleofection cuvettes, followed by protein solution, pipetting up and down to mix. Cells were nucleofected with program CM-130, immediately after which 80 μL of warmed media was added to each well for recovery. After 5 min, 25 μL from each sample was added to 250 μL of fresh media in a 48-well poly-D-lysine plate (Corning). Cells were then treated the same way as lipofected cells above for genomic DNA extraction after 3 more days of culture.

### HTS of Genomic DNA Samples

[0606] HTS of genomic DNA from HEK293T cells was performed as previously described¹. Primers for PCR 1 of target genomic site amplification are listed in FIGS. 22A-22B, and amplicons for analyses are listed in FIGS. 23A-23F. Following Illumina barcoding, PCR products were pooled and purified by electrophoresis with a 2% agarose gel using a Monarch DNA Gel Extraction Kit (New England Biolabs), eluting with 30 μl H2O. DNA concentration was quantified with Qubit dsDNA High Sensitivity Assay Kit (ThermoFisher Scientific) and sequenced on an Illumina MiSeq instrument (paired-end read, R1: 250-280 cycles, R2: 0 cycles) according to the manufacturer's protocols.

### HTS Data Analysis

[0607] Sequencing reads were demultiplexed using the MiSeq Reporter (Illumina) and FASTQ files were analyzed using CRISPResso2⁵², a publicly available algorithm that provides analyses of genome editing outcomes from deep sequencing data. See Clement et al., Nat Biotechnol. 2019 March; 37(3):224-226, herein incorporated by reference. Dual editing in individual alleles were analyzed by a Python script provided below in Supplementary Note 1. Base-editing values are representative of n=3 independent biological replicates collected by different researchers, with the mean±s.d. shown. Base-editing values are reported as a percentage of the number of reads with adenine mutagenesis over the total aligned reads. All raw FASTQ files generated are available from the NCBI SRA under BioProject PRJNA589228.

### Preparation of RNA Libraries for RNA-Seq

[0608] Polyadenylated mRNA was enriched from 1 μg of total RNA using the PolyA mRNA isolation kit (Takara) on the Apollo 324 instrument. Stranded RNA-seq libraries were generated from these samples using the PrepX mRNA 48 kit (Takara) on the Apollo 324 followed by barcoding and amplification (12 cycles). Following PCR and bead cleanup with AmpureXP beads (Beckman Coulter), libraries were visualized on a 2200 TapeStation (Agilent) and quantified using a Library Quantification Kit (KAPA Biosystems) for multiplexing. Libraries were sequenced on a NextSeq high-throughput flowcell (Illumina) as 75 bp paired-end reads. All raw FASTQ files generated are available from the NCBI SRA under BioProject PRJNA589228.

### RNA-Seq Data Analysis

[0609] Analysis of the transcriptome-wide editing RNA sequencing data was performed as follows. Prior to the analysis described below, FASTQ files were generated using Bcl2fastq2, then trimmed using Trimmomatic version 0.32 to remove adaptor sequences, unpaired sequences, and low-quality bases. Sam alignments were created using HISAT2 to align paired reads from each of three biological replicates to the hg19 human reference genome (UCSC). Precomputed HISAT2 indexes where obtained from ccb.jhu.edu/software/hisat2/index.shtml. The resulting sam files were sorted and indexed using the samtools software package.

[0610] To calculate the average % of A-to-I editing amongst adenosines sequenced in transcriptome-wide sequencing analysis, REDItools v1.3 was used to quantify the % A-to-I editing in each sample. All nucleotides were removed except adenosines from the analysis, and then removed all adenosines with a read coverage less than 10 to avoid errors due to low sampling; additionally, positions with a mapping or read quality score below 25 were removed. Next, the number of adenosines converted to an inosine in each sample was calculated and divided this by the total number of adenosines in the dataset after filtering to obtain a percentage of adenosines edited to inosine in the transcriptome. Calculation of s.e.m. was generated by comparison of 3 biological replicates.

### Reproducibility

[0611] Biologically independent experiments reported here were performed by different researchers using independent splits of the mammalian cell type used.

[0612] Supplementary Note 1—Python script to extract allele frequencies with two edits.

```
#!/usr/bin/env python
# coding: utf-8
# In[ 1]:
#import python packages import pandas as pd
import matplotlib.pyplot as plt import numpy as np
# In[2]:
#import data
#names is a tab-delimited file containing the CRISPResso2.0 allele frequency table filenames.
#here, names.txt contains 18 filenames, sorted by site, editor, and biological replicate.
names = “names.txt”
df = pd.read_table(names,delim_whitespace=True)
df.set_index(‘file’,inplace=True)
#group the files according to their corresponding genomic locus.
files_site5 = list(df.index.values)[0:6] #six files: three for three ABE7.10 replicates; three for
three ABE8e replicates.
files_site6 = list(df.index.values)[6:12]
files_site7 = list(df.index.values)[12:18]
# In[3]:
def get_data(site,D):
  “‘Function inputs: site number (here: 5,6, or 7), and allele frequencies table (D).
  Function output: the percent of total alleles in which both of the adenine (A) substrates are
  converted to the desired guanine (G) products.
Gu and Gd correspond to a G product at the upstream and downstream target positions,
respectively.
’”
if site == 5:
total_reads = D[D[“Aligned_Sequence”].str.contains(‘..............................’,
regex=True)][“#Reads”].sum( )
#Gu G at upstream position; Gd = G at downstream position
Gu_Gd = D[D[“Aligned_Sequence”].str.contains(‘...........GG.................’,
regex=True)][“#Reads”].sum( )
percent_Gu_Gd = 100*Gu_Gd/total_reads
data = {‘% of total reads with both substrates edited’: percent_Gu_Gd}
if site == 6:
total_reads = D[D[“Aligned_Sequence”].str.contains(‘..............................’,
regex=True)][“#Reads”].sum( )
Gu_Gd = D[D[“Aligned_Sequence”].str.contains(‘.........G...G................’,
regex=True)][“#Reads”].sum( )
percent_Gu_Gd = 100*Gu_Gd/total_reads
data = {‘% of total reads with both substrates edited’: percent_Gu_Gd
if site == 7:
total_reads = D[D[“Aligned_Sequence”].str.contains(‘..............................’,
regex=True)][“#Reads”].sum( )
Gu_Gd = D[D[“Aligned_Sequence”].str.contains(‘........G....G................’,
regex=True)][“#Reads”].sum( )
percent_Gu_Gd = 100*Gu_Gd/total_reads
data = {‘% of total reads with both substrates edited’: percent_Gu_Gd
return data
# In[4]:
def makedfs(site,names):
“‘Function inputs: Site number (here: 5,6, or 7) and the names.txt file.
Please note: ABE7.10 is henceforth referred to as ABE7 in the code.
Function output: Two tables, one for ABE7 and one for ABE8e, that contain the get_data
function output for
each of the three biological replicates at the designated site.
’”
#i, below, is initialized and subsequently used to track iterations of the for loop
#and to appropriately assign the allele frequency table to the corresponding editor
(ABE7.10 or ABE8e)
i = 0
global df_ABE7
global df_ABE8e
for file in names:
D = pd.read_table(file,delim_whitespace=True)
#the output after the first three iterations (0<=i<=2) is the ABE7.10 dataframe
if i == 0:
    df_ABE7 = pd.DataFrame(get_data(site,D),index=[str(file)])
if 1 <= i <= 2:
    D_output_new = pd.DataFrame(get_data(site,D),index=[str(file)]) df_ABE7 =
pd.concat([df_ABE7, D_output_new], axis =0)
#the output after the final three iterations (3<=i<=5) is the ABE8e dataframe
if i == 3:
    df_ABE8e=pd.DataFrame(get_data(site,D),index=[str(file)]) if 4<=i<=5:
D_output_new = pd.DataFrame(get_data(site,D),index=[str(file)]) df_ABE8e=
pd.concat([df_ABE8e, D_output_new], axis =0)
i+=1 #tracking iteration
    return df_ABE7,df_ABE8e
# In[5]:
#create dataframes
ABE7Site5,ABE8eSite5 = makedfs(5,files_site5)
ABE7Site6,ABE8eSite6 = makedfs(6,files_site6)
ABE7Site7,ABE8eSite7 = makedfs(7,files_site7)
# In[6]:
#for the given editor and site, obtain the average, across three biologial replicates,
#percent of total alleles in which both substrate bases are converted.
ABE7_Site5_GuGd_average = float(ABE7Site5.mean( ))
ABE8e_Site5_GuGd_average = float(ABE8eSite5.mean( ))
ABE7_Site6_GuGd_average = float(ABE7Site6.mean( ))
ABE8e_Site6_GuGd_average = float(ABE8eSite6.mean( ))
ABE7_Site7_GuGd_average = float(ABE7Site7.mean( ))
ABE8e_Site7_GuGd_average = float(ABE8eSite7.mean( ))
#store averages by editor for subsequent plotting
means_ABE7 =
(ABE7_Site5_GuGd_average,ABE7_Site6_GuGd_average,ABE7_Site7_GuGd_average)
means_ABE8e =
(ABE8e_Site5_GuGd_average,ABE8e_Site6_GuGd_average,ABE8e_Site7_GuGd_average)
#for the given editor and site, obtain the standard deviation, across three
#biological replicates, in the percent of total alleles in which both substrate bases are converted.
ABE7_Site5_GuGd_std = float(ABE7Site5.std( ))
ABE8e_Site5_GuGd_std = float(ABE8eSite5.std( ))
ABE7_Site6_GuGd_std = float(ABE7Site6.std( ))
ABE8e_Site6_GuGd_std = float(ABE8eSite6.std( ))
ABE7_Site7_GuGd_std = float(ABE7Site7.std( ))
ABE8e_Site7_GuGd_std = float(ABE8eSite7.std( ))
#store standard deviations by editor for subsequent plotting
std_ABE7 = (ABE7_Site5_GuGd_std,ABE7_Site6_GuGd_std,ABE7_Site7_GuGd_std)
std_ABE8e = (ABE8e_Site5_GuGd_std,ABE8e_Site6_GuGd_std,ABE8e_Site7_GuGd_std)
# In[7]:
#number of sites n_sites = 3
#create plot
fig, ax = plt.subplots( )
index = np.arange(n_sites)
bar_width = 0.35
opacity = 1
#plot data
ABE7bars = plt.bar(index, means_ABE7,
bar_width,alpha=opacity,color=‘#A0A0A3’,label=‘ABE7.10’,yerr=std_ABE7,capsize=5)
ABE8ebars = plt.bar(index + bar_width, means_ABE8e, bar_width,
alpha=opacity,color=‘#F94040’,label=‘ABE8e’,yerr=std_ABE8e,capsize=5)
#label plot
plt.ylabel(‘Percent of total alleles in which both ¥n substrate bases are converted’)
plt.xticks(index + bar_width/2, (‘Site 5’, ‘Site 6’, ‘Site 7’))
#display plot with legend
plt.legend( )
plt.tight_layout( )
plt.show( )
# In[ ]:
```

### REFERENCES FOR EXAMPLES 1-4

[0613] 1. Komor, A. C., Kim, Y. B., Packer, M. S., Zuris, J. A. & Liu, D. R. Programmable editing of a target base in genomic DNA without double-stranded DNA cleavage. Nature 533, 420-424 (2016).
[0614] 2. Gaudelli, N. M. et al. Programmable base editing of A*T to G*C in genomic DNA without DNA cleavage. Nature 551, 464-471 (2017).
[0615] 3. Rees, H. A. & Liu, D. R. Base editing: precision chemistry on the genome and transcriptome of living cells. Nat. Rev. Genet. 19, 770-788 (2018).
[0616] 4. Landrum, M. J. et al. ClinVar: public archive of interpretations of clinically relevant variants. Nucleic Acids Res. 44, D862-868 (2016).
[0617] 5. Landrum, M. J. et al. ClinVar: public archive of relationships among sequence variation and human phenotype. Nucleic Acids Res. 42, D980-985 (2014).
[0618] 6. Hu, J. H. et al. Evolved Cas9 variants with broad PAM compatibility and high DNA specificity. Nature 556, 57-63 (2018).
[0619] 7. Huang, T. P. et al. Circularly permuted and PAM-modified Cas9 variants broaden the targeting scope of base editors. Nat. Biotechnol. 37, 626-631 (2019).
[0620] 8. Kim, Y. B. et al. Increasing the genome-targeting scope and precision of base editing with engineered Cas9-cytidine deaminase fusions. Nat. Biotechnol. 35, 371-376 (2017).
[0621] 9. Kleinstiver, B. P. et al. Engineered CRISPR-Cas12a variants with increased activities and improved targeting ranges for gene, epigenetic and base editing. Nat. Biotechnol. 37, 276-282 (2019).
[0622] 10. Li, X. et al. Base editing with a Cpf1-cytidine deaminase fusion. Nat. Biotechnol. 36, 324-327 (2018).
[0623] 11. Nishimasu, H. et al. Engineered CRISPR-Cas9 nuclease with expanded targeting space. Science 361, 1259-1262 (2018).
[0624] 12. Esvelt, K. M., Carlson, J. C. & Liu, D. R. A system for the continuous directed evolution of biomolecules. Nature 472, 499-503 (2011).
[0625] 13. Badran, A. H. & Liu, D. R. In vivo continuous directed evolution. Curr. Opin. Chem. Biol. 24, 1-10 (2015).
[0626] 14. Nishida, K. et al. Targeted nucleotide editing using hybrid prokaryotic and vertebrate adaptive immune systems. Science 353 (2016).
[0627] 15. Komor, A. C. et al. Improved base excision repair inhibition and bacteriophage Mu Gam protein yields C:G-to-T:A base editors with higher efficiency and product purity. Sci. Adv. 3, eaao4774 (2017).
[0628] 16. Koblan, L. W. et al. Improving cytidine and adenine base editors by expression optimization and ancestral reconstruction. Nat. Biotechnol. 36, 843-846 (2018).
[0629] 17. Komor, A. C., Badran, A. H. & Liu, D. R. Editing the genome without double-stranded DNA breaks. ACS Chem. Biol. 13, 383-388 (2018).
[0630] 18. Villiger, L. et al. Treatment of a metabolic liver disease by in vivo genome base editing in adult mice. Nat. Med. 24, 1519-1525 (2018).
[0631] 19. Ryu, S. M. et al. Adenine base editing in mouse embryos and an adult mouse model of Duchenne muscular dystrophy. Nat. Biotechnol. 36, 536-539 (2018).
[0632] 20. Yeh, W. H., Chiang, H., Rees, H. A., Edge, A. S. B. & Liu, D. R. In vivo base editing of post-mitotic sensory cells. Nat. Commun. 9, 2184 (2018).
[0633] 21. Tanaka, S. et al. In vivo targeted single-nucleotide editing in zebrafish. Sci. Rep. 8, 11423 (2018).
[0634] 22. Zhang, Y. et al. Programmable base editing of zebrafish genome using a modified CRISPR-Cas9 system. Nat. Commun. 8, 118 (2017).
[0635] 23. Ma, Y. et al. Highly efficient and precise base editing by engineered dCas9-guide tRNA adenosine deaminase in rats. Cell Discov. 4, 39 (2018).
[0636] 24. Zafra, M. P. et al. Optimized base editors enable efficient editing in cells, organoids and mice. Nat. Biotechnol. 36, 888-893 (2018).
[0637] 25. Liu, Z. et al. Efficient generation of mouse models of human diseases via ABE- and BE-mediated base editing. Nat. Commun. 9, 2338 (2018).
[0638] 26. Liu, Z. et al. Highly efficient RNA-guided base editing in rabbit. Nat. Commun. 9, 2717 (2018).
[0639] 27. Song, C.-Q. et al. Adenine base editing in an adult mouse model of tyrosinaemia. Nat. Biomed. Eng. (2019).
[0640] 28. Yourik, P., Fuchs, R. T., Mabuchi, M., Curcuru, J. L. & Robb, G. B. Staphylococcus aureus Cas9 is a multiple-turnover enzyme. RNA 25, 35-44 (2019).
[0641] 29. Bryson, D. I. et al. Continuous directed evolution of aminoacyl-tRNA synthetases. Nat Chem Biol. 13, 1253-1260 (2017).
[0642] 30. Carlson, J. C., Badran, A. H., Guggiana-Nilo, D. A. & Liu, D. R. Negative selection and stringency modulation in phage-assisted continuous evolution. Nat. Chem. Biol. 10, 216-222 (2014).
[0643] 31. Dickinson, B. C., Leconte, A. M., Allen, B., Esvelt, K. M. & Liu, D. R. Experimental interrogation of the path dependence and stochasticity of protein evolution using phage-assisted continuous evolution. Proc. Natl. Acad. Sci. U.S.A. 110, 9007-9012 (2013).
[0644] 32. Dickinson, B. C., Packer, M. S., Badran, A. H. & Liu, D. R. A system for the continuous directed evolution of proteases rapidly reveals drug-resistance mutations. Nat. Commun. 5, 5352 (2014).
[0645] 33. Hubbard, B. P. et al. Continuous directed evolution of DNA-binding proteins to improve TALEN specificity. Nat. Methods 12, 939-942 (2015).
[0646] 34. Leconte, A. M. et al. A population-based experimental model for protein evolution: effects of mutation rate and selection stringency on evolutionary outcomes. Biochemistry 52, 1490-1499 (2013).
[0647] 35. Packer, M. S., Rees, H. A. & Liu, D. R. Phage-assisted continuous evolution of proteases with altered substrate specificity. Nat. Commun. 8, 956 (2017).
[0648] 36. Wang, T., Badran, A. H., Huang, T. P. & Liu, D. R. Continuous directed evolution of proteins with improved soluble expression. Nat. Chem. Biol. 14, 972-980 (2018).
[0649] 37. Roth, T. B., Woolston, B. M., Stephanopoulos, G. & Liu, D. R. Phage-Assisted Evolution of Bacillus methanolicus Methanol Dehydrogenase 2. ACS Synth. Biol. 8, 796-806 (2019).
[0650] 38. Thuronyi, B. W. et al. Continuous evolution of base editors with expanded target compatibility and improved activity. Nat. Biotechnol., 1070-1079 (2019).
[0651] 39. Badran, A. H. et al. Continuous evolution of Bacillus thuringiensis toxins overcomes insect resistance. Nature 533, 58-63 (2016).
[0652] 40. Badran, A. H. & Liu, D. R. Development of potent in vivo mutagenesis plasmids with broad mutational spectra. Nat. Commun. 6, 8425 (2015).
[0653] 41. Swarts, D. C., van der Oost, J. & Jinek, M. Structural Basis for Guide RNA Processing and Seed-Dependent DNA Targeting by CRISPR-Cas12a. Mol. Cell 66, 221-233 (2017).
[0654] 42. Grunewald, J. et al. CRISPR DNA base editors with reduced RNA off-target and self-editing activities. Nat. Biotechnol. 37, 1041-1048 (2019).
[0655] 43. Liang, P. et al. Genome-wide profiling of adenine base editor specificity by EndoV-seq. Nat. Commun. 10, 67 (2019).
[0656] 44. Tsai, S. Q. et al. GUIDE-seq enables genome-wide profiling of off-target cleavage by CRISPR-Cas nucleases. Nat. Biotechnol. 33, 187-197 (2015).
[0657] 45. Rees, H. A. et al. Improving the DNA specificity and applicability of base editing through protein engineering and protein delivery. Nat. Commun. 8, 15790 (2017).
[0658] 46. Grunewald, J. et al. Transcriptome-wide off-target RNA editing induced by CRISPR-guided DNA base editors. Nature 569, 433-437 (2019).
[0659] 47. Rees, H. A., Wilson, C., Doman, J. L. & Liu, D. R. Analysis and minimization of cellular RNA editing by DNA adenine base editors. Sci. Adv. 5, eaax5717 (2019).
[0660] 48. Zhou, C. et al. Off-target RNA mutation induced by DNA base editing and its elimination by mutagenesis. Nature 571, 275-278 (2019).
[0661] 49. Amato, A. et al. Interpreting elevated fetal hemoglobin in pathology and health at the basic laboratory level: new and known gamma-gene mutations associated with hereditary persistence of fetal hemoglobin. Int. J. Lab. Hematol. 36, 13-19 (2014).
[0662] 50. Canver, M. C. et al. BCL11A enhancer dissection by Cas9-mediated in situ saturating mutagenesis. Nature 527, 192-197 (2015).
[0663] 51. Doman, J. L. R., A.; Newby, G. A.; Liu, D. R. Evaluation and minimization of Cas9-Independent off-target DNA editing by cytosine base editors. Nat. Biotechnol. in press (2019).
[0664] 52. Clement, K. et al. CRISPResso2 provides accurate and rapid genome editing sequence analysis. Nat. Biotechnol. 37, 224-226 (2019).

### Example 5: Application of ABE8e Base Editors to Rescue of Sickle Cell Disease in Human Hematopoietic Stem Cells and in Mice

[0665] Sickle cell disease (SCD) is a common, catastrophic disorder caused by a missense mutation in the HBB gene encoding the β-globin subunit of adult hemoglobin1. An adenine base editor variant (ABE8e-NRCH) with laboratory-evolved deaminase and laboratory-evolved Cas9 domains^{2, 3} was used to convert the SCD allele (HBB^{S}) to hemoglobin Makassar (HBB^{G}), a naturally occurring non-pathogenic allele^{4, 5}. Delivery of mRNA encoding ABE8e-NRCH and an HBB^{S}-targeting single guide RNA (sgRNA) into CD34+ hematopoietic stem and progenitor cells (HSPCs) from three patients with SCD using a clinically validated electroporation method resulted in 80% average conversion of HBB^{S} to HBB^{G} with no detectable perturbation of erythropoiesis. Reticulocytes differentiated from edited CD34+ cells showed an 80% shift of total β-like globin protein from sickle ((3S) to Makassar ((3G), and a 3-fold decrease in hypoxia-induced sickling. Sixteen weeks after transfer of edited human CD34+ cells into adult immunodeficient mice, the HBB^{S}-to-HBB^{S} editing frequency in engrafted cells was 68%, indicating durable modification of HSCs. Donor-derived reticulocytes isolated from the bone marrow of engrafted mice showed a shift of 63% of total β-like protein from PS to PG, and a 5-fold decrease in hypoxia-induced sickling. Since human HSPCs do not develop into durable circulating red blood cells in mice, ABE8e-NRCH and sgRNA ribonucleoprotein were also electroporated into HSPCs from a mouse harboring human SCD alleles, resulting in 56% conversion of HBB^{S} to HBB^{S}. Sixteen weeks after transplantation of these edited mouse HSPCs into irradiated adult congenic mice, circulating red blood cells (RBCs) showed a shift of 84% of total β-like protein from PS to PG, and a 3-fold decrease in hypoxia-induced sickling. Mice that received base-edited SCD HSPCs showed rescue of hematologic parameters to near-normal levels and substantially reduced splenic pathology compared to mice transplanted with unmodified HSPCs. These findings suggest a potential one-time autologous treatment for individuals with SCD that both eliminates pathogenic HBB^{S} and generates benign HBB^{S}.

[0666] Sickle cell disease (SCD) is an autosomal recessive disorder caused by an A-to-T substitution in the HBB gene, which normally encodes the adult β-globin subunit (β^{A}) of the hemoglobin tetramer, HbA (α₂β₂). At low oxygen concentrations, the mutant β-globin subunit (β^{S}) causes the sickle hemoglobin tetramer (HbS) to form stiff polymers within red blood cells (RBCs) resulting in the characteristic sickle shape and triggering a pathophysiologic cascade of hemolysis, inflammation, dysregulated nitric oxide homeostasis, and microvascular occlusion. Clinical manifestations include anemia, severe acute and chronic pain, immunodeficiency with susceptibility to sepsis, multi-organ failure and early death¹. Allogeneic hematopoietic stem cell (HSC) transplantation can cure SCD, although most patients do not have suitable HLA-matched donors and the procedure can lead to immune complications including graft rejection and graft-versus-host disease⁶.

[0667] Ex vivo modification of autologous HSCs to correct the SCD mutation or circumvent its deleterious effects forms the basis for numerous experimental therapies⁷⁻¹¹. Approaches showing early promise in clinical trials include the ectopic expression of an anti-sickling β-like globin gene by lentiviral vectors¹² or suppression of the BCL11A gene to reactivate fetal hemoglobin (HbF, α₂β₂) production, either by a lentiviral vector-expressed short hairpin RNA against BCL11A13 or by Cas9-mediated disruption of the BCL11A erythroid-specific enhancer¹⁴. These approaches, while promising, have limitations. Lentiviral vectors carry risks of insertional mutagenesis and may not effectively suppress the expression of pathological HbS. Induction of HbF does not eliminate the production of HbS, and the level of HbF required to rescue SCD is not established and is difficult to address in mouse models, where hemoglobin regulatory elements differ from those in human patients. Transplantation of CD34+ cells into immunocompromised mice can be used to examine HbF induction in erythroid precursors but cannot be used to assess hematological correction since circulating human RBCs are very short-lived in mice¹⁵. Eliminating the root cause of SCD by converting the HBB^{S} allele to a benign variant without perturbing native regulation of globin genes could address these limitations. Cas9-mediated HDR can correct HBB^{S}, but is difficult to achieve efficiently in repopulating HSCs^{16, 17} and carries the risk of uncontrolled editing byproducts mediated by double-stranded DNA breaks (DSBs) including indels, translocations, and loss of large chromosomal segments¹⁸⁻²³, as well as other potentially deleterious cell-state changes such as p53 activation²²⁻²⁵.

[0668] Adenine base editors (ABEs) convert A•T base pairs to G•C at targeted locations in the genome of living cells without requiring DSBs or donor DNA templates and with minimal indel formation^{2, 26-29}. In SCD, the normal GAG (Glu) codon encoding amino acid 6 of β-globin is mutated to GTG (Val). While adenine base editing cannot reverse the SCD mutation to the wild-type allele, it can in principle convert the pathogenic codon to GCG (Ala). The resulting HBB allele is a non-pathogenic variant termed Hb-Makassar (HBB⁶)³⁻⁵ (FIG. 30A), one of hundreds of documented naturally occurring HBB alleles^{3, 31}.

[0669] The ABE8e-NRCH monomer base editor was used to convert the SCD allele to the non-pathogenic HBB^{G} Makassar allele in mammalian cells with minimal non-synonymous editing outcomes. After introducing ABE8e-NRCH mRNA or RNP into CD34+ hematopoietic stem and progenitor cells (HSPCs) from individuals with SCD, up to 80% allelic conversion of HBB^{S} to HBB^{G} was achieved. In vitro differentiation of edited HSPCs generated erythroid cells with 81% reduced βS protein that was replaced by Makassar β-globin ((3G). The edited HSPCs engrafted into adult mice with equal efficiency as unedited control HSPCs, and with no apparent change in differentiation potential. The edited HBB^{G} allele was durable in mice (68% HBB^{G} 16 weeks after transplantation), and erythroid cells from transplanted animals showed markedly reduced hypoxia-induced sickling compared to cells derived from unedited HSCs. To assess correction of blood phenotypes and SCD rescue in an animal, ex vivo HSPCs were edited from a mouse SCD mode132 in which endogenous globin genes were replaced by human HBB^{S} and an autologous bone marrow transplant of these edited cells was simulated into irradiated recipient adult mice. Sixteen weeks after transplantation of edited HBB^{S/S} mouse HSPCs, >95% of circulating mouse blood was donor-derived cells, with an average of 46% HBB^{S}-to-HBB^{G} conversion. Total β-like globin in these animals averaged 84% PG. Animals receiving edited cells showed substantial rescue of spleen pathology, RBC sickling, and reticulocyte count, as well as restoration of total hemoglobin, RBC count, and hematocrit to near-normal levels. These findings suggest autologous ex vivo base editing and transplantation of HSCs as a potential one-time treatment for SCD.

### Results

### Evaluation of Editing Strategies to Modify the Sickle Cell Mutation

[0670] Placing the pathogenic HBB^{S} mutation within the activity window of an adenine base editor requires engaging a non-canonical CACC protospacer-adjacent motif (PAM) (FIG. 30A). To address this limitation, an evolved a Cas9 domain was used that was previously developed to recognize NRCH PAM sites (N=A, C, G, or T; R=A or G; and H=A, C, or T)3. Separately, phage-assisted continuous evolution (PACE) was used to evolve deoxyadenosine deaminases such as TadA-8e that support much higher base editing efficiencies than ABE7.10max2. To achieve highly efficient editing of HBB^{S}, the TadA-8e deaminase was combined with the NRCH PAM-targeting Cas9 nickase domain to generate ABE8e-NRCH. ABE8e-NRCH plasmid lipofection converted the HBB^{S} allele to HBB^{G} in HEK293T cells with an efficiency of 58±6.9% as measured by high-throughput DNA sequencing (HTS), 1.7-fold higher than that of ABE7.10max-NRCH (FIG. 34). Beyond conversion of the pathogenic A•T (Val) at protospacer position 7 to G•C (Ala), all other observed bystander edits in the target protospacer following ABE8e-NRCH treatment were silent (A•T-to-G•C conversions at positions 9 and 12, where the CACC PAM begins at protospacer position 21) (FIG. 30A). No bystander editing was observed at the nearest A•T base pair that would result in a non-silent edit (position 16). These results establish ABE8e-NRCH as a base editor that uses a recently evolved Cas9 variant to optimally position a high-activity laboratory-evolved deoxyadenosine deaminase to initiate conversion of the pathogenic A•T base pair.

[0671] Next, ABE8e-NRCH was used to edit human HSPCs via electroporation either of ABE8e-NRCH protein complexed with the HBB^{S}-targeting sgRNA as a ribonucleoprotein (RNP), or of ABE8e-NRCH mRNA and the sgRNA28. ABE8e-NRCH protein was purified and complexed with the single guide RNA (sgRNA) that targets the HBB^{S} allele to generate ABE8e-NRCH RNP. Poly-A tailed ABE8e-NRCH mRNA was produced from in vitro transcription and co-transcriptional capping. The synthetic sgRNA used in both RNP and mRNA formulations contained 2′-O-methyl modifications in the first three and last three nucleosides, and phosphorothioate linkages following each of the first three and preceding each of the last three nucleosides in order to enhance stability and reduce toxicity³³. MaxCyte electroporation was chosen to deliver ABE8e-NRCH RNP or mRNA because of the established clinical pathway for this procedure in ex vivo blood cell modification.

[0672] Electroporating ABE8e-NRCH RNP into plerixafor-mobilized peripheral blood CD34+ HSPCs cells from three separate SCD patient donors resulted in 44±5.9% editing of HBB^{S} to HBB^{G} with no other missense mutations detected and low indels (1.2±0.33%) 6 days after electroporation (FIG. 30B). Electroporating ABE8e-NRCH mRNA and sgRNA into the same cells resulted in 80±2.1% editing of HBB^{S} to HBB^{G} with no detectable missense mutations and 2.8±0.50% indels (FIGS. 30B and 35). Thus, introduction of ABE8e-NRCH RNP or mRNA using a clinically relevant delivery protocol can efficiently convert HBB^{S} to HBB^{G} in HSPCs from individuals with SCD.

Erythrocyte Properties after In Vitro Differentiation of Edited HSPCs

[0673] To determine whether editing led to the desired shift of erythrocyte β-globin protein from βS to βG, SCD patient CD34+ HSPCs edited with ABE8e-NRCH mRNA or RNP were differentiated in vitro over 18 days into late-stage erythroid cells (FIG. 36, Table 5)^{34, 35}. These cells were lysed and reverse-phase high performance liquid chromatography (HPLC) was performed to quantify cytoplasmic β-like globin proteins (FIG. 37). Untreated SCD patient CD34+ cells generated erythroid cells containing 87±1.3% PS and no detectable PG. In contrast, SCD patient CD34+ cells treated with ABE8e-NRCH mRNA generated reticulocytes with 72±3.0% PG and only 17±3.0% PS, representing a 5.1-fold (81%) decrease of the pathogenic (3-globin protein (FIG. 30C). The remaining β-like globins were composed of γ and δ globin, which are generally present at low basal levels. These findings show that ABE8e-NRCH-mediated editing of the HBB^{S} allele results in a substantial loss of PS protein, with concomitant production of PG to represent the majority of total cellular β-like globin protein.

| | | | | Reference |
|---|---|---|---|---|
| | | | | (PMID |
| Antibody and | | | | using this |
| fluorophore | Clone | Vendor | Catalog # | antibody) |
| Erythropoeisis | | | | |
| Anti-Human CD235a | GA-R2 (HIR2) | BD | 559943 | 31698466 |
| FITC | | Pharmingen ™ | | |
| Hoechst 33342 | Stock 10 mM = | Millipore Sigma | B2261 | 31698466 |
| | 2000× | | | |
| Anti-Human CD49d | 9F10 | BioLegend | 304304 | 31698466 |
| PE | | | | |
| Anti-Human Band3 | | New York Blood | Gift from | 31698466 |
| APC | | Center | X. An | |
| Chimerism after | | | | |
| human/NBSGW | | | | |
| xenotransplantation | | | | |
| Anti-Mouse CD45 | 30-F11 (RUO)/ | BD | 561088/ | 11062533/ |
| FITC/BV786 | 30-F11 (RUO) | Pharmingen ™/ | 564225 | 31698466 |
| | | BD Horizon ™ | | |
| Anti-Mouse TER- | TER-119 | BD | 560512 | 31698466 |
| 119/Erythroid Cells | | Pharmingen ™ | | |
| Per CP-Cy ™ 5.5 | | | | |
| Anti-Human CD45 | HI30 | BD Horizon ™ | 564047 | 31698466 |
| BV605 | | | | |
| Anti-Human CD33 | P 67.6 | BD Biosciences | 333946 | 31698466 |
| PE-Cy ™ 7 | | | | |
| Anti-Human CD3 | SK7 (Leu-4) | BD | 557832 | 31698466 |
| APC-Cy ™ 7 | (RUO) | Pharmingen ™ | | |
| Anti-Human CD19 | 4G7 (IVD)/ | BD | 349209/ | 31698466/ |
| (Leu ™-12) PE/FITC | HIB19(RUO) | Biosciences/ | 555412 | 7690791 |
| | | BD Pharmingen ™ | | |
| Anti-Human CD34 | 581 (RUO)/ | BD | 561440/ | 7680152 |
| Alexa Flour 700/PE | 581 (RUO) | Pharmingen ™/ | 555822 | |
| | | BD Pharmingen ™ | | |
| Anti-Human CD235a | GA-R2 (HIR2) | BD | 551336 | 31698466 |
| APC | (RUO) | Pharmingen ™ | | |
| Chimerism after | | | | |
| Townes SCD mouse | | | | |
| transplantation | | | | |
| Anti-mouse CD45.1 | A20 | BD Biosciences | 553776 | 28615666 |
| PE | | | | |
| Anti-mouse CD45.2 | 104 | BD Biosciences | 561874 | 28615666 |
| FITC | | | | |

Table 5. Antibodies Used in this Study.

[0674] Next, it was assessed whether the replacement of βS with βG reduced erythroid cell sickling caused by polymerization of deoxygenated hemoglobin. Purified reticulocytes generated from in vitro differentiation of unedited or ABE8e-NRCH edited SCD patient CD34+ cells were incubated in 2% oxygen for 8 hours. While reticulocytes from unedited cells showed sickled morphology with 47.7% frequency, reticulocytes from edited CD34+ HSPCs exhibited a 16.3% sickled frequency, a 2.9-fold reduction (FIGS. 30D-30E). These data confirm that conversion of HBB^{S} to HBB^{G} reduces sickling. Erythroid cells differentiated from CD34+ cells treated with ABE8e-NRCH RNP showed similar results but with modestly lower efficiencies (FIGS. 30C-30E), confirming that RNP electroporation was less efficient than mRNA electroporation using these methods.

[0675] To determine whether ABE-mediated conversion of HBB^{S} to HBB^{S} alters erythropoiesis, flow cytometry was used to track the expression of cell-surface maturation markers CD49d, CD235a, and Band3 during the 18-day culture period^{34, 35} and used a Hoechst stain to distinguish enucleated reticulocytes from earlier-stage nucleated erythroblasts. No differences in the expression kinetics of these markers were observed between edited and unedited cells (FIG. 36), suggesting that editing with ABE8e-NRCH does not alter erythropoiesis.

### Genome-Wide Computational and Experimental Off-Target Analysis

[0676] To assess genomic off-target editing that might be introduced by ABE8e-NRCH and the HBB^{S}-targeting sgRNA, both computational and experimental methods were used to nominate candidate off-target sites genome-wide^{36, 37} (FIG. 30F). The Cas-OFFinder algorithm was used to computationally identify all 140 NRCH PAM-containing genomic sites with three or fewer mismatches to the protospacer, or two or fewer mismatches allowing for wobble base pairing. CIRCLE-seq, an experimental off-target identification method38, 39, was also performed to detect where Cas9-NRCH nuclease programmed with the HBB^{S}-targeting sgRNA cleaves purified human genomic DNA in vitro. CIRCLE-seq identified 601 candidate off-target sites. The 140 sites nominated by Cas-OFFinder and the 601 top sites nominated by CIRCLE-seq shared only 15 sites in common, consistent with previous reports of a low degree of overlap between computationally predicted and experimentally identified off-target loci^{40, 41}.

[0677] Next, off-target editing in SCD patient CD34+ HSPCs treated with ABE8e-NRCH mRNA or RNP was assessed. Multiplex targeted HTS were performed of 217 of the top-scoring potential off-target sites: 103 identified by CIRCLE seq and 129 identified by Cas-OFFinder, including 15 shared sites. Twelve sites identified by Cas-OFFinder were not amenable to multiplex sequencing. Point mutations consistent with adenine base editing were detected above that of untreated control cells at 24 of the 217 sequenced sites. All 24 sites at which off-target editing was observed were candidates identified by CIRCLE-seq, and four of them were also identified by Cas-OFFinder (FIGS. 30F, 38, 39), highlighting the importance of using experimental methods to define genome-wide off-target activity.

[0678] Off-target activity was distributed predominantly in intergenic and intronic regions, with the exception of one off-target point mutation found in the promoter region of CCDC85B (344 base pairs upstream of the transcription start site) and two found in exons (FIG. 30G). Only silent point mutations were introduced by off-target base editing in the two exons, which included HBD, a close homologue of the target HBB gene, and SLC34A1, a kidney-specific gene.

[0679] Off-target editing was less frequent after electroporation with ABE8e-NRCH RNP rather than mRNA, possibly due to shorter duration of exposure and/or lower editing activity (FIGS. 30H, 38, 39)^{2, 42, 43.} Indel frequencies were <2% at all off-target sites (FIG. 39). Collectively, these findings from genome-wide computational and experimental off-target analyses did not reveal any off-target point mutations anticipated to have clinical relevance to hematopoiesis from base editing of SCD patient HPSCs with ABE8e-NRCH.

Transplantation of Edited Human Cells into Immunodeficient Mice

[0680] It was next examined whether base editing can convert HBB^{S} to HBB^{G} in transplanted HSCs that have repopulated bone marrow, without disrupting their multipotency, an important therapeutic requirement. CD34+ HSPCs from three different SCD patients were edited by electroporation of ABE8e-NRCH mRNA with sgRNA, or of ABE8e-NRCH RNP. After 24 hours, the resulting six sets of cells and a set of unedited control cells from each donor were each transplanted via tail-vein injection into 3-4 immunodeficient NOD, B6.SCID Il2rγ−/−KitW41/W41 (NBSGW) mice, each 7-9 weeks old. Sixteen weeks after infusion, the mice were sacrificed and their bone marrow was harvested for analysis (FIG. 31A). By this time, remaining human donor-derived cells are thought to be generated from long-term bone marrow repopulating HSCs capable of sustaining a hematopoietic system¹⁵.

[0681] The disruption of targeted genes in HSCs or T-cells cells through the introduction of DSBs or by Cre recombinase-mediated deletion has been reported to produce defects in engraftment or memory T-cell maintenance^{25, 44}. To determine whether ABE8e-NRCH conversion of HBB^{S} to HBB^{G} causes defects in differentiation potential or survival of detectable lineages, the human hematopoietic lineages present in recipient mouse bone marrow were assessed after transplantation. Flow cytometry using an anti-human CD45 antibody revealed approximately 70% engraftment of ABE8e-NRCH edited or untreated control CD34+ cells (FIG. 31B). Flow cytometry to quantify the relative abundances of human B-cells (CD19+), myeloid cells (CD33+), T-cells (CD3+), and erythroid cells (CD235a+) revealed equivalent proportions of each lineage in animals receiving either unedited or edited cells (FIGS. 31C, 31D, Table 5). Together, these results indicate that the differentiation potential of CD34+ cells was not altered by base editing.

[0682] Skewed hematopoiesis resulting from base editing could be reflected by alterations in editing levels within affected lineages. To examine this possibility, frequencies of edited alleles each lineage that could be readily purified for DNA sequencing were assessed. Fluorescence activated cell sorting (FACS) and human lineage-specific fluorescent antibodies were used to purify donor-derived mononuclear cells (total bone marrow; CD45+), B-cells (CD19+), myeloid cells (CD33+), HSPCs (CD34+) and erythroblasts (CD235a+) from mouse recipient bone marrow (FIGS. 41-42). PCR amplification of extracted genomic DNA followed by HTS of the targeted region of the HBB locus revealed that all isolated cell populations contained the desired HBB^{S}-to-HBB^{G} edit at similar frequencies ranging from 67.7±6.6% to 69.0±5.7% (FIG. 31E), suggesting that allele proportion was maintained in HSCs and in their various differentiated progeny. The modest decrease from 80% editing observed before transplantation could reflect slightly higher editing efficiency of non-repopulating cells within the complex mixture of CD34+ HSPCs, with 68% editing efficiency achieved in repopulating HSCs. Collectively, these results indicate that ABE8e-NRCH mediates efficient conversion of HBB^{S} to HBB^{G} in repopulating HSCs without impeding their engraftment or multipotency relative to untreated controls.

[0683] Circulating human RBCs are very short-lived in mice¹⁵. Therefore, the properties of human erythroid cells isolated from the bone marrow of mice transplanted with ABE-treated or untreated SCD patient CD34+ cells were examined. Human donor cell-derived CD235a+ erythroblasts were purified by magnetic-activated cell sorting (MACS) and analyzed for β-globin protein content by reverse-phase HPLC. The fraction of βS dropped from 96±0.28% of total β-like globin in erythroid cells derived from unedited HSPCs to 40±2.3% after base editing. The PG fraction was undetectable in erythroid cells from unedited HSPCs and rose to 58±2.8% after base editing (FIG. 31F). Human erythroid cells derived from edited HSPCs showed a 5-fold reduction in sickling compared to unedited control cells (14.5±5.1% vs. 72.5±8.6%; FIGS. 31G-31H). Cells edited using RNP showed similar trends, although editing was less efficient (FIG. 40). Taken together, these data indicate that HBB^{S}-to-HBB^{G} base-edited SCD donor-derived HSCs can repopulate the hematopoietic system normally and generate erythroid cells containing mostly PG with a greatly reduced propensity for hypoxic sickling.

### Transplantation of Edited Mouse HSCs in a SCD Mouse Model

[0684] Transplantation of human HSPCs into mice cannot be used to assess physiological SCD disease phenotypes due to the short lifetime of circulating human red blood cells in mice. To determine if base editor conversion of HBB^{S} to HBB^{G} can alleviate hematological phenotypes of SCD, lineage-negative (Lin−) HSPCs were edited from a mouse SCD model (also known as the “Townes mouse”) in which the endogenous adult-expressed α- and β-like globin genes are replaced by human globin genes, with the majority of β-like globin expression arising from human HBB^{S} and leading to sickle cell disease phenotypes32. Mice harboring one normal and one SCD HBB allele (genotype HBB^{A/S}) model the human SCD heterozygotes (sickle cell trait), a generally healthy condition (Table 6) in this animal model and in humans by most metrics.

TABLE 6
Complete blood counts from SCD model mice. Complete blood counts were
collected from transplanted animals using a FORCYTE Veterinary Hematology
Analyzer 16 weeks after the transplant before sacrifice. Generally healthy
HBB^{A/S} untransplanted animals were also measured at 4-6 months of
age. RBC, red blood cells; Hb, hemoglobin; Hct, hematocrit; MCV, mean
corpuscular volume; MCH, mean corpuscular hemoglobin; MCHC, mean corpuscular
hemoglobin concentration; RDW, red cell distribution width; WBC, white blood
counts. Data are shown as mean values ± SD. Statistical significance
was assessed using one-way ANOVA, with Sidak's multiple comparisons test
of the edited HBB^{S/S} values in comparison to each other group to calculate
p-values.

| Condition | Unedited | Edited | Unedited | Unedited |
|---|---|---|---|---|
| Genotype | HBB^{S/S} | HBB^{S/S} | HBB^{A/S} | HBB^{A/S} |
| Transplanted | Yes | Yes | Yes | No |
| No. of | 6 | 6 | 2 | 5 |
| mice analyzed | | | | |
| RBC (×10⁶/μL) | 6.52 ± 0.37 | 10.37 ± 0.81 | 10.74 ± 0.04 | 10.46 ± 0.60 |
| | ****p < 0.0001 | | ns, p = 0.8402 | ns, p = 0.9916 |
| Reticulocytes (%) | 41.45 ± 5.69 | 13.72 ± 5.81 | 9.46 ± 5.44 | 8.80 ± 1.46 |
| | ****p < 0.0001 | | ns, p = 0.6700 | ns, p = 0.3239 |
| Hb (g/dL) | 8.67 ± 0.42 | 10.77 ± 0.41 | 10.80 ± 0.71 | 10.88 ± 0.34 |
| | ****p < 0.0001 | | ns, p = 0.9996 | ns, p = 0.9624 |
| Hct (%) | 25.33 ± 1.27 | 30.70 ± 2.82 | 31.35 ± 0.35 | 32.70 ± 1.71 |
| | ***p = 0.0009 | | ns, p = 0.9717 | ns, p = 0.3143 |
| MCV (fL) | 38.87 ± 0.83 | 29.62 ± 1.02 | 29.15 ± 0.21 | 31.28 ± 1.32 |
| | ****p < 0.0001 | | ns, p = 0.9278 | *p = 0.0493 |
| MCH (pg) | 12.72 ± 1.74 | 10.40 ± 0.71 | 11.90 ± 1.98 | 10.40 ± 0.37 |
| | *p = 0.0144 | | ns, p = 0.3884 | ns, p > 0.9999 |
| MCHC (g/dL) | 33.98 ± 1.65 | 35.22 ± 2.44 | 35.20 ± 0.85 | 33.30 ± 0.88 |
| | ns, p = 0.5726 | | ns, p > 0.9999 | ns, p = 0.2571 |
| RDW (%) | 35.72 ± 1.07 | 27.08 ± 1.93 | 23.65 ± 1.06 | 23.70 ± 0.44 |
| | ****p < 0.0001 | | *p = 0.0182 | **p = 0.0022 |
| WBC | 39.67 ± 7.36 | 27.70 ± 6.99 | 26.49 ± 10.17 | 23.51 ± 6.88 |
| (×10³/uL) | *p = 0.0379 | | ns, p = 0.9961 | ns, p = 0.7390 |
| Platelets | 558.2 ± 95.4 | 614.8 ± 138.7 | 732.5 ± 178.9 | 1023.6 ± 134.1 |
| (×10³/uL) | ns, p = 0.8381 | | ns, p = 0.6233 | ***p = 0.0003 |

[0685] ABE8e-NRCH RNP was electroporated into HBB^{S/S} HSPCs from Townes mice and transplanted edited HSPCs into irradiated adult recipient mice (8-12 weeks old) at 24 hours after electroporation. Unedited HBB^{S/S} and HBBA/S HSPCs were used as disease and healthy controls, respectively. Donor mice hematopoietic cells express the CD45.2 antigen, while the congenic recipients express CD45.1, which can be discriminated from CD45.2 by flow cytometry using specific antibodies (FIG. 32A and Table 5)³². Blood was collected at 6, 10, 14, and 16 weeks after transplantation to track engraftment and β-globin content.

[0686] By 10 weeks post-transplantation, donor engraftment was >90% in all mice as determined by expression of the CD45.2 surface marker on blood mononuclear cells (FIG. 32B). High-level engraftment of edited and control donor HSPCs persisted similarly throughout the time course, indicating that editing did not disrupt the fitness of transplanted HSCs. The frequency of HBB^{S}-to-HBB^{G} editing was measured by HTS of genomic DNA (FIG. 32C). Pre-transplantation HBB^{S}-to-HBB^{G} editing efficiency measured 3 days after electroporation in a subset of cells maintained in culture was 53±4.5%. Editing levels in genomic DNA extracted from whole blood after animals were sacrificed at 16 weeks post-transplantation showed 44±11% HBB^{G} allele frequency. As observed with human HSPCs (FIG. 31E), the modest decrease in HBB^{G} allele frequency during the 16 weeks of engraftment could arise if repopulating HSCs are less amenable to electroporation or base editing than short-term or non-repopulating cells within the heterogenous Lin− population.

[0687] To measure the effect of base editing on the hemoglobin composition of circulating RBCs, reverse-phase HPLC was performed on peripheral blood cell lysates from each time point. PG made up 70-85% of total β-like globin in blood from mice receiving edited SCD HSPCs, with little fluctuation throughout the course of the experiment (FIG. 32D). The enrichment of PG over the observed editing efficiency, 70-85% vs. 42-57%, respectively, likely arises from the increased lifetime of βG-expressing RBCs caused by a reduction in sickling.

[0688] To determine whether PG leads to any defect in oxygen binding, hemoglobin-oxygen association was spectroscopically assessed in blood extracted from mice receiving unedited HBB^{S/S} cells, HBB^{A/S} cells, or edited HBB^{S/S} cells 14 weeks after transplantation (FIG. 43). No apparent difference was observed in oxygen binding, indicating that (3G-containing hemoglobin tetramers bind oxygen normally.

### Phenotypic Rescue of SCD in Transplanted Animals

[0689] Complete blood counts were performed on mice transplanted with edited (n=6) or unedited (n=6) mouse HBB^{S/S} HSPCs, as well as on two mice transplanted with unedited HBBA/S cells and five non-transplanted mice with an HBS^{A/S} genotype (FIGS. 32E-32H and Table 6). Compared to healthy controls (non-transplanted HBBA/S mice or those transplanted with HBB^{A/S} HSPCs), mice that received unedited mouse HBB^{S/S} HSPCs exhibited significant differences in RBC parameters, including decreased RBC count, decreased total blood hemoglobin concentration (Hb), elevated reticulocyte count, and elevated white blood cell count (FIGS. 32E-32H). These abnormalities are consistent with hemolytic anemia and also observed in SCD patients³². Importantly, base editing of HBB^{S/S} HSPCs restored all tested blood parameters to levels that were similar to those of healthy controls (FIGS. 32E-32H). These results indicate that base editing of HBB^{S} to HBB^{G} ex vivo followed by bone marrow transplantation can rescue the hematological defects caused by SCD.

[0690] To assess the consequence of base editing on circulating RBC morphology, blood smears from mice at 16 weeks were analyzed after transplantation (FIG. 33A). Morphological abnormalities consistent with SCD were apparent in RBCs of mice that received unedited HBB^{S/S} cells. These included abundant oblong sickle forms, polychromasia (dark purple cells) reflecting reticulocytosis, and fragmentation (schistocytes). The RBCs of mice that were transplanted with HBB^{S}-to-HBB^{G} edited HSPCs showed a reduction in all pathologic morphologies and were more similar to RBCs of the healthy HBB^{A/S} control (FIG. 33A). Separately, blood was incubated for 8 hours in 2% oxygen to further induce RBC sickling (FIGS. 33B-33C). Red blood cells from mice transplanted with edited HBB^{S/S} HSPCs showed 29.8±6.5% sickling, compared to 86.3±3.0% of RBCs from mice receiving unedited HBB^{S/S} HSPCs, a 2.9-fold decrease. These data establish that transplantation of edited HBB^{S/S} HSPCs leads to durable production of PG-expressing RBCs that are resistant to sickling both in vitro after exposure to hypoxia and in vivo.

[0691] Splenomegaly (enlarged spleen) in SCD patients and mouse models results from phagocytosis of sickled cells, vascular congestion, and extramedullary erythropoiesis to compensate for accelerated RBC loss from hemolysis³². The average spleen mass of mice receiving edited HBB^{S/S} cells was 0.22±0.043g, compared to 0.39±0.016g in mice receiving unedited HBB^{S/S} cells and 0.11±0.007g in mice receiving HBB^{A/S} cells (FIGS. 33D-33E). Thus, the average spleen mass was restored by 61% towards that of healthy control mice in animals receiving base edited cells (FIG. 33D). Histopathology analysis of spleen from mice that received unedited HBB^{S/S} cells revealed RBC pooling caused by vascular congestion and increased ratio of red pulp to white pulp signifying extramedullary erythropoiesis. In contrast, the spleens of mice that received edited HBB^{S/S} cells resembled those of the healthy control mice that received HBB^{A/S} cells (FIG. 33F). Taken together, the persistence of ABE8e-NRCH-mediated HBB^{S}-to-HBB^{G} editing in bone marrow-repopulating HSCs and the partial or complete rescue of every examined SCD phenotype suggest that ex vivo base editing of HBB^{S} has the potential to alleviate SCD.

### Discussion

[0692] Adenine base editing enables precise and efficient conversion of A•T base pairs to GC without requiring double-strand DNA breaks, thereby circumventing uncontrolled and often undesired editing outcomes such as indels or translocations. An ABE variant with a laboratory-evolved ABE8e deaminase and a laboratory-evolved Cas9-NRCH domain that can directly convert the major SCD mutation (HBB^{S}) to a benign 3-globin gene variant (HBB^{G}) is described herein. This base editing strategy occurred efficiently (up to 80% editing in CD34+ HSPCs), led to low levels of indels (<3%), and restored functional hemoglobin without disruption of natural gene regulation or hematopoiesis.

[0693] The HBB^{A}-to-HBB^{S} mutation converts glutamic acid to valine at residue 6 of the (3-globin protein. Polymerization of HbS is mediated in part by interaction of the mutant Val6 with a hydrophobic pocked formed by amino acids Leu88, Phe85, Thr84, Glu73 and Ala70 of another 3-globin molecu1e45. The replacement of Val6 with Ala through conversion of HBB^{S} to HBB^{G} produces a profound reduction in RBC sickling, likely because the Ala6 side chain in HbG does not have sufficient affinity for the hydrophobic pocket of 3-globin, and is therefore incapable of supporting polymerization⁴⁶.

[0694] Numerous approaches for autologous genetic therapies to treat SCD are being evaluated in the clinic, including induction of γ-globin by genome editing or lentiviral vector modulation, lentiviral vector gene therapy to deliver an ectopic non-sickling 3-globin gene, and Cas9 nuclease-mediated homology directed repair (HDR) to correct the SCD mutation⁷⁻¹¹. It is not yet known which strategy is safest and most effective. However, the base editing approach demonstrated here offers several potential advantages.

[0695] First, elimination of the disease-causing mutation by precise conversion of HBB^{S} to HBB^{G} may reduce the RBC HbS concentration (the primary determinant of polymerization) more effectively than lentiviral vector-mediated β-like globin expression or induction of HbF where HBB^{S} alleles remain intact. While genome editing or gene delivery in HSPCs has been shown to repress PS in erythroid progeny by 30-70%^{34, 47-49}, up to 80% decreased levels of PS was achieved in bulk erythroid populations by direct base editing of HBB^{S}. Therapeutic thresholds for HbF induction that are required to entirely prevent SCD-associated complications are not well defined. In contrast, allogeneic bone marrow transplantation studies of patients with SCD have shown that approximately 25-30% chimerism of non-sickling cells (HBB^{NA} or HBB^{A/S}) induce substantial clinical improvement^{50, 51}. The results in this study suggest that an even greater proportion of chimerism for HBB^{G} should be attainable using the approach described here.

[0696] Second, base editing largely avoids double-stranded DNA breaks (DSBs) that are generated by Cas9 nuclease, as well as insertional mutagenesis that can be caused by integration of DNA vectors required by some alternative approaches⁵²⁻⁵⁴. Potentially undesired outcomes of DSBs include uncontrolled mixtures of indels⁵⁵, translocations⁵⁶, chromosomal loss¹⁸, large deletions that are difficult to detect by HTS¹⁹⁻²¹, and selection against the p53 DNA damage response that suppresses tumor formation²²⁻²⁵.

[0697] Third, base editing obviates the requirement for co-delivery of a donor DNA template that is necessary for HDR or of viral DNA for gene therapy. The introduction of DNA can lead to toxicity and undesired genomic integration. In contrast, base editing directly converts pathogenic HBB^{S} into the naturally occurring non-pathogenic HBB^{G} allele that is known to be benign, even in homozygous or hemizygous form, with no DNA delivery requirement, as demonstrated by the mRNA and RNP treatments in this study.

[0698] Potential undesired consequences of base editing HSPCs were examined. Base editors can cause bystander editing of nearby adenine (ABE) or cytidine (CBE) nucleotides. In this study, bystander editing was limited to synonymous changes that should not interfere with the intended editing outcome. Spurious editing of RNA can occur but is transient when base editor mRNA or RNP is used, and did not appear to affect repopulation or differentiation of HSCs in this study. Indeed, it has been shown that levels of spurious RNA editing by ABEs are low in hematopoietic cells⁵⁷. Off-target DNA editing can also occur. Of the 24 identified sites at which off-target editing was observed, no missense mutations were introduced and no off-target edits were detected that are predicted to disrupt the function of any regulatory regions. Nevertheless, further refinement of this strategy to minimize off-target editing, for example by testing alternate ABE variants shown to minimize Cas-dependent or Cas-independent off-target editing^{2, 27, 58, 59}, optimizing doses of editing agent^{2, 60}, or optimizing delivery methods, may enhance the safety and therapeutic potential of this approach.

[0699] The ex vivo delivery procedure used in this study is similar to methods currently used for HSC editing in clinical trials¹⁴. The ABEs were electroporated as mRNA or RNP to minimize the duration of exposure to the editing agent, thereby reducing off-target editing activity^{2, 61}. HSCs were edited using a single electroporation and transplanted into adult animals after 24 hours to minimize the duration of in vitro tissue culture that can lead to the loss of HSC engraftment and multipotency⁶². The base-edited SCD patient-derived CD34+ cells used in this study could be the basis for autologous therapies based on precise conversion of the SCD mutation to a benign variant ex vivo, followed by transplantation.

[0700] Ideally, in vivo delivery methods that support base editing in HSCs would enable the administration of this editing strategy by injection, rather than the more demanding current approach, which requires isolation of patient HSCs followed by their in vitro modification and transplantation. Recent developments in the delivery of genome editing agents in vivo are encouraging^{63-66.} Such methods applied to HSCs could simplify the procedure and greatly broaden the availability of a potential one-time treatment for SCD.

### Methods

### HEK293T Cell Culture and Editing

[0701] HEK293T cells (ATCC CRL-3216) were cultured in Dulbecco's modified Eagle's medium (Corning) supplemented with 10% fetal bovine serum (ThermoFisher Scientific) and maintained at 37° C. with 5% CO₂. For plasmid transfection, HEK293T cells were seeded at 20,000 cells per well on 96-well poly-D-lysine plates (Corning) in the same culture medium. Cells were transfected 24-30 h after plating with 0.5 μL Lipofectamine 2000 (ThermoFisher Scientific) using 200 ng base editor plasmid and 66 ng guide RNA plasmid following manufacturer's instructions. Cells were cultured for 3 days following lipofection, then washed with PBS (ThermoFisher Scientific). Genomic DNA was extracted after removing PBS by addition of 50 μL freshly prepared lysis buffer (10 mM Tris-HCl, pH 7.5, 0.05% SDS, 25 μg/mL proteinase K (ThermoFisher Scientific)) directly into each transfected well. The mixture was incubated at 37° C. for 1 h then heat inactivated at 80° C. for 30 min. One microlitre of this lysate was used as a PCR template for high-throughput sequencing.

### High-Throughput Sequencing of the HBB SCD Locus in HEK293T Cells

[0702] High-throughput sequencing (HTS) of genomic DNA was performed as previously described 26, 67. Primers for amplification of the HBB SCD locus in HEK293T cells were:

GAN162F
(SEQ ID NO: 492)
5′-ACACTCTTTCCCTACACGACGCTCTTCCGATCTNNNNAGGGTTGGCC
AATCTACTCCC-3′;
and
GAN163R
(SEQ ID NO: 493)
5′-TGGAGTTCAGACGTGTGCTCTTCCGATCTGTCTTCTCTGTCTCCACA
TGCC-3′.

[0703] Underlined sequences represent adapters for Illumina sequencing. Following Illumina barcoding, PCR products were pooled and purified by electrophoresis with a 2% agarose gel using a Monarch DNA Gel Extraction Kit (New England Biolabs), eluting with 30 μL H2O. DNA concentration was quantified with Qubit dsDNA High Sensitivity Assay Kit (ThermoFisher Scientific) and sequenced on an Illumina MiSeq instrument (single-end read, 250-300 cycles) according to the manufacturer's protocols. Alignment of fastq files and quantification of editing frequency was performed using CRISPResso2⁶⁸ in batch mode with a window width of 34 nucleotides.

ABE8e-NRCH mRNA

[0704] ABE8e-NRCH mRNA was transcribed in vitro from PCR product using full substitution of N1-methylpseudouridine for uridine. mRNA was capped co-transcriptionally using CleanCap AG analog (TriLink Biotechnologies) resulting in a 5′ Cap 1 structure. In vitro transcription reaction was performed as previously described 69 with the following changes; 16.5 mM magnesium acetate and 4 mM CleanCap AG were used as the final concentration during transcription, and mRNAs were purified using RNeasy kit (QIAgen). Mammalian-optimized UTR sequences (TriLink) and a 120 base poly A tail were included in the transcribed PCR product.

### ABE8e-NRCH Protein

[0705] ABE8e-NRCH protein was codon optimized for bacterial expression and cloned into the protein expression plasmid pD881-SR (Atum, Cat. No. FPB-27E-269). The expression plasmid was transformed into BL21 Star DE3 competent cells (ThermoFisher, Cat. No. C601003). Colonies were picked for overnight growth in terrific broth (TB)+25 ug/mL kanamycin at 37° C. The next day, 2 L of pre-warmed TB were inoculated with overnight culture at a starting OD₆₀₀ of 0.05. Cells were shaken at 37° C. for about 2.5 hours until the OD₆₀₀ was ˜1.5. Cultures were cold shocked in an ice-water slurry for 1 hour, following which L-rhamnose was added to a final concentration of 0.8% to induce. Cultures were then incubated at 18° C. with shaking for 24 hours to express protein. Following induction, cells were pelleted and flash-frozen in liquid nitrogen and stored at −80 degrees. The next day, cells were resuspended in 30 mL cold lysis buffer (1 M NaCl, 100 mM Tris-HCl pH 7.0, 5 mM TCEP, 10% glycerol, with 5 tablets of cOmplete, EDTA-free protease inhibitor cocktail tablets (Millipore Sigma, Cat. No. 4693132001). Cells were passed three times through a homogenizer (Avestin Emulsiflex-C3) at ˜18,000 psi to lyse. Cell debris was pelleted for 20 minutes using a 20,000 g centrifugation at 4° C. Supernatant was collected and spiked with 40 mM imidazole, followed by a 1-hour incubation at 4° C. with 1 mL of Ni-NTA resin slurry (G Bioscience Cat. No. 786-940, prewashed once with lysis buffer). Protein-bound resin was washed twice with 12 mL of lysis buffer in a gravity column at 4° C. Protein was eluted in 3 mL of elution buffer (300 mM imidazole, 500 mM NaCl, 100 mM Tris-HCl pH 7.0, 5 mM TCEP, 10% glycerol). Eluted protein was diluted in 40 mL of low-salt buffer (100 mM Tris-HCl, pH 7.0, 5 mM TCEP, 10% glycerol) just before loading into a 50 mL Akta Superloop for ion exchange purification on the Akta Pure25 FPLC. Ion exchange chromatography was conducted on a 5 mL GE Healthcare HiTrap SP HP pre-packed column (Cat. No. 17115201). After washing the column with low-salt buffer, the diluted protein was flowed through the column to bind. The column was then washed in 15 mL of low salt buffer before being subjected to an increasing gradient to a maximum of 80% high salt buffer (1 M NaCl, 100 mM Tris-HCl, pH 7.0, 5 mM TCEP, 10% glycerol) over the course of 50 mL, at a flow rate of 5 mL per minute. 1-mL fractions were collected during this ramp to high-salt buffer. Peaks were assessed by SDS-PAGE to identify fractions containing the desired protein, which were concentrated first using an Amicon Ultra 15-mL centrifugal filter (100-kDa cutoff, Cat. No. UFC910024), followed by a 0.5-mL 100-kDa cutoff Pierce concentrator (Cat. No. 88503). Concentrated protein was quantified using a BCA assay (ThermoFisher, Cat. No. 23227).

### Isolation and Culture of CD34+ Hematopoietic Stem and Progenitor Cells (HSPCs)

[0706] Circulating G-CSF-mobilized human mononuclear cells were obtained from deidentified healthy adult donors (Key Biologics, Lifeblood). Plerixafor-mobilized CD34+ cells from patients with SCD were collected according to the protocol “Peripheral Blood Stem Cell Collection for Sickle Cell Disease Patients” (ClinicalTrials.gov identifier NCT03226691), which was approved by the human subject research institutional review boards at the National Institutes of Health and St. Jude Children's Research Hospital. All participants provided informed consent. Enrichment of CD34+ cells was performed by immunomagnetic bead selection using a CliniMACS Plus or AutoMACS instrument (Miltenyi Biotec). CD34+ cells were maintained in stem cell culture media: X-VIVO-10 (Lonza, BEBP02-055Q) media supplemented with 100 ng/μL human SCF (R&D systems, 255-SC/CF), 100 ng/μL human TPO (R&D systems, 288-TP/CF) and 100 ng/μL human Flt-3 ligand (R&D systems, 308-FK/CF). Cells were seeded and maintained at a density of between 0.5-1×10⁶ cells/mL.

RNP and mRNA Electroporation in Human HSPCs

[0707] Electroporation was performed with an ATX MaxCyte electroporator using electroporation program HSC3. The modified synthetic sgRNA contained 2′-O-methyl modifications in the first three and last three nucleotides, and phosphorothioate bonds between the first three and last three nucleotides and was purchased from BioSpring. CD34+ HSPCs were thawed 48 hours before electroporation. mRNA and sgRNA were mixed at a 1:1 weight ratio prior to electroporation. RNPs were formed at a 1:1.5 ratio of ABE and Makassar sgRNA, and incubated for 20 minutes at room temperature prior to electroporation. mRNA/SgRNA were electroporated at 200 μg/mL of mRNA and RNP were electroporated at a final concentration of 9 μM of protein per reaction. 20-40 million cells/mL were electroporated in 100 μL of Maxcyte Buffer in OC-100 cartridges for transplantation into NBSGW animals. Electroporated cells were recovered in stem cell culture media composed of X-VIVO 10 media including cytokines (Flt-3 ligand, SCF, and TPO). Cells were maintained in culture at a density between 0.5-1×10⁶ per mL. Genomic DNA was extracted on culture days 2 and 6 using Qiagen extraction buffer then analyzed by HTS for editing efficiency.

### High-Throughput Sequencing of the HBB SCD Locus in Blood Cells

[0708] After editing, the HBB SCD locus was amplified from genomic DNA with oligonucleotide primers:

Forward.LF
(SEQ ID NO: 494)
5′- CTACACGACGCTCTTCCGATCTTGGCCAATCTACTCCCAGGAGCAG
G-3′;
and
Reverse.LR
(SEQ ID NO: 495)
5′- CAGACGTGTGCTCTTCCGATCTTCAAAGAACCTCTGGGTCCAAGGG
T-3′

[0709] Underlined sequences represent adapters for Illumina sequencing. Following Illumina barcoding, PCR products were pooled and HTS was conducted using a MiSeq or MiniSeq (Illumina). Sequences were analyzed by joining paired reads and analyzing amplicons for indels or the desired test sequence using CRIS.py70. Indels were reported as the number of reads without the WT amplicon length.

### Erythroid Cell Culture

[0710] Erythroid differentiation of CD34+ cells was performed using a 3-phase protocol34, 35. Phase 1 (days 1-7): IMDM (Thermo Fisher Scientific, 12440061) with 2% human blood type AB plasma (SeraCare, 1810-0001), 3% human AB serum (Atlanta Biologicals, 540110) 1% penicillin/streptomycin (Thermo Fisher Scientific, 15070063), 3 units/mL heparin (Sagent Pharmaceuticals, NDC #25021-401-02), 3 units/mL EPO (Amgen, EPOGEN NDC #55513-144-01), 200 μg/mL holo-transferrin (Millipore Sigma, T0665, 10 ng/mL human SCF (R&D systems, 255-SC/CF), and 1 ng/mL human interleukin IL-3 (R&D systems, 203-IL/CF). Phase 2 (days 8-14): Phase 1 medium without IL-3. Phase 3 (days 15-21): Phase 2 medium without SCF and with holo-transferrin concentration increased to 1 mg/mL. Cells were maintained daily at a density of 0.1×10⁶/mL (phase 1), 0.2×10⁶/mL (phase 2) and 1.0×10⁶/mL (phase 3)

[0711] Erythroblast maturation was monitored by immuno-flow cytometry for the cell surface markers CD235a, CD49d, and Band3 (Table 5). To quantify erythroblast enucleation, 1.5-5×10⁵ CD34+-derived erythroid cells were incubated with Hoechst 33342 for 20 min at 37° C., fixed with 0.05% glutaraldehyde, and permeabilized with 0.1% Triton X-100. Cells were stained with FITC mouse anti-human CD235a then analyzed by flow cytometry.

### Hemoglobin Quantification

[0712] High-performance liquid chromatography (HPLC) quantification of individual globin chains was performed using reverse-phase columns on a Prominence HPLC System (Shimadzu Corporation). The eluted proteins were identified by light absorbance at 220 and 415 nm using a diode array detector. For analysis of erythroid cells derived from in vitro differentiation of human CD34+ cells, the relative amounts of different β-like globin proteins were calculated from the area under the 415-nm peak and normalized according to the DMSO control. They are expressed as a fraction of the total β-like globins including normal β (βA) sickle β (βS), Makassar β (βG), γ, and δ-globin.

### In Vitro Sickling Assay

[0713] Erythroid cells were incubated with Hoechst 33342 for 20 mins at 37oc, Hoechst negative population were sorted using a SH1800 (Sony Biotechnologies). Sorted cells (0.5-1.0×10⁵ cells) were seeded 12 or 96 well plate with 1 mL or 0.1 mL of phase 3 ED media under hypoxic conditions (2% 02) for 24 h. The IncuCyte® S3 Live-Cell Analysis System (Sartorius) with a 20× objective was used to monitor cell sickling, with images being captured every 1 h. The percentage of sickling was measured by manual counting of sickled cells versus normal cells based on morphology. For mouse transplantation studies, mouse blood was diluted (1:5000) in RPMI media and seeded in 6 well plate with 3 mL of RPMI media before imaging in IncuCyte S3.

### CIRCLE-Seq Off-Target Editing Analysis

[0714] Genomic DNA from HEK293T cells was isolated using Gentra Puregene Kit (QIAGEN) according to manufacturer's instructions. CIRCLE-seq was performed as previously described38, 39. Briefly, purified genomic DNA was sheared with a Covaris S2 instrument to an average length of 300 bp. The fragmented DNA was end repaired, A tailed and ligated to a uracil-containing stem-loop adaptor, using KAPA HTP Library Preparation Kit, PCR Free (KAPA Biosystems). Adaptor ligated DNA was treated with Lambda Exonuclease (NEB) and E. coli Exonuclease I (NEB) and then with USER enzyme (NEB) and T4 polynucleotide kinase (NEB). Intramolecular circularization of the DNA was performed with T4 DNA ligase (NEB) and residual linear DNA was degraded by Plasmid-Safe ATP-dependent DNase (Lucigen). In vitro cleavage reactions were performed with 250 ng of Plasmid-Safe-treated circularized DNA, 90 nM of Cas9-NRCH protein, Cas9 nuclease buffer (NEB) and 90 nM of synthetic chemically modified sgRNA (BioSpring), in a 100 μl volume. Cleaved products were A tailed, ligated with a hairpin adaptor (NEB), treated with USER enzyme (NEB) and amplified by PCR with barcoded universal primers NEBNext Multiplex Oligos for Illumina (NEB), using Kapa HiFi Polymerase (KAPA Biosystems). Libraries were sequenced with 150 bp paired-end reads on an Illumina MiSeq instrument. CIRCLE-seq data analyses were performed using open-source CIRCLE-seq analysis software and default recommended parameters (https://github.comitsailabSJ/circleseq).

### CasOFFinder Off-Target Editing Analysis

[0715] Computational prediction of NRCH PAM-containing potential off-target sites with minimal mismatches relative to the intended target site (three or fewer mismatches overall, or two or fewer mismatches allowing G:U wobble base pairings with the guide RNA) was performed using CasOFFinder^{36, 37}.

Targeted Amplicon Sequencing by rhAmpSeq

[0716] On- and off-target sites identified by CIRCLE-seq and CasOFFinder were amplified from genomic from CD34+ donors using rhAMPSeq system (IDT). Sequencing libraries were generated according to manufacturer's instructions and sequenced with 151-bp paired-end reads on an Illumina NextSeq instrument.

### Quantification of Base Editing Efficiency at Evaluated Off-Target Sites

[0717] The A•T-to G•C editing frequency for each position in the protospacer was quantified using CRISPRessoPooled (v2.0.41) with quantification_window_size 10, quantification_window_center −10, base_editor_output, conversion_nuc_from A, conversion_nuc_to G. The genomic features of the confirmed off-target sites were annotated using HOMER (v4.10) 71. The editing frequency for each site was calculated as the ratio between the number of reads containing the edited base (i.e., G) and the total number of reads. To calculate statistical significance of off-target editing for the ABE8e-NRCH mRNA or RNP treatments compared to control samples, a Chi-square test was applied for each of four samples (i.e., two donors, each with two replicates). The 2×2 contingency table was constructed based on the number of edited reads and the number of unedited reads in treated and control groups. FDR was calculated using the Benjamini/Hochberg method. The 24 reported significant off-targets were called based on: (1) FDR <0.05 and (2) difference in editing frequency between treated and control >1% for at least one treatment. The software used to conduct this analysis is available to download from this website: https://github.com/tsailabSJ/MKSR_off_targets.

### Ethical Approval for Studies Involving Mice

[0718] All studies utilizing mice were approved by the St. Jude Children's Research Hospital Institutional Animal Care and Use Committee under Protocol 579 entitled “Genetic Models for the Study of Hematopoiesis”. Mice were maintained in the St. Jude Children's Research Hospital Animal Resource Center according to recommendations in the Guide for the Care and Use of Laboratory Animals of the National Institutes of Health.

Transplantation of Gene-Edited CD34+ HSPCs into NOD.Cg-KitW-41J Tyr+ Prkdcscid Il2rgunlVVjl/Thomj (NBSGW) Mice

[0719] NBSGW mice were purchased from The Jackson Laboratory (stock no. 026622). Base edited or control CD34+ cells were administered at a dose of 0.2×106 per mouse with an IP injection of 10 mg/kg of busulfan (Busulfex; PDL BioPharm) 48 hours before infusion72 or 0.5×106 per mouse with no busulfan preconditioning by tail-vein injection in female mice aged 7-9 weeks. Chimerism post-transplantation was evaluated at 16-17 weeks in the bone marrow at the time of euthanasia (see supplemental Table 1). Cell lineage composition was determined in the bone marrow by using human-specific antibodies (see Table 5), and lineages were analyzed using the Attune N×T flow cytometer (ThermoFisher) and sorted using a FACSAria III cell sorter (BD Biosciences). CD34+ HSPCs or CD235a+ erythroblasts were isolated with magnetic beads, using the human-specific CD34 MicroBead Kit UltraPure (Miltenyi Biotec Inc., catalog #130-100-453) and CD235a (glycophorin A) MicroBeads, human, (Miltenyi Biotec Inc., catalog #130-050-501).

### Base Editing and Transplantation of Townes Mouse SCD HSPCs

[0720] Townes SCD mice were purchased from The Jackson Laboratory (Stock #013071). This strain harbors the human a-globin locus (HBA1) in place of the orthologous mouse loci Hba1 and Hba2, and the human g-globin (HBG1) and b-globin (HBB^{S} or HBBA) loci in place of the endogenous mouse loci Hbb-b1 and Hbb-b2. Bone marrow mononuclear cells were obtained by flushing femurs, tibias, hip bones and humeri with IMDM (10% FBS) followed by RBC lysis (ACK Lysing Buffer). Lineage marker negative (Lin−) cells enriched for HSPCs were purified by immuno-magnetic bead selection using the Mouse Lineage Cell Depletion Kit (Miltenyi, 130-090-858). Lin− cells were cultured in Lineage Negative Media: StemSpan SFEM supplemented with mSCF (100 ng/μL), mIL-3 (10 ng/μL), mIL-11 (100 ng/μL), hFLT3ligand (100 ng/μL) and PenStrep (1×) for 24 hours prior to base editing. Ribonucleoprotein complex was generated by incubating ABE8e-NRCH with targeting sgRNA at concentrations of 2.25 μM base editor and 6.75 uM gRNA (1:3 ratio) in T buffer (total volume 50 μL) for thirty minutes at room temperature. Electroporation was performed using the ThermoFisher Neon Transfection System with 100-μL tips in buffer E2 at 1700 pulse voltage, 20 pulse width, 1 pulse.

[0721] Following electroporation, cells were cultured overnight in Lineage Negative Media, followed by transplantation via tail-vein injection of 106 cells into lethally irradiated (1,125 cGy delivered as a single dose), 8-12 week old C57B1/6 PepBoy (CD45.1) recipients. For analysis following transplantation peripheral blood was collected from the retro-orbital sinus using heparinized micro-hematocrit capillary tubes. Complete blood counts CBCs were performed using a FORCYTE Veterinary Hematology Analyzer. CBC measurements were collected from untransplanted HBBA/S mice at 4-6 months of age. Blood smears were prepared using modified Romanowsky methanolic staining and eosin and thiazin methods. Engraftment was determined by flow cytometry for mouse anti-CD45.1-PE (BD Cat #553776) and mouse anti-CD45.2-FITC (BE Cat #561874).

### Oxygen Binding Measurements

[0722] Hemoglobin-oxygen equilibrium curves (OECs), to determine the oxygen binding affinity of HbA, HbS and HbG, were obtained using the Hemox Analyzer (TCS Scientific, New Hope, Pa.). Mouse blood or was added to the analysis buffer containing Hemox solution (pH 7.4 at 37° C.), Additive-A (BSA-20), and anti-foaming agent (AFA-25) according to the manufacturer's protocol. Each sample was oxygenated at 37° C. using compressed air and then deoxygenated with compressed N2, while subjected to continuous dual-wavelength spectrophotometry to determine the oxyhemoglobin to deoxyhemoglobin ratio along with continuous measurement of the oxygen partial pressure. OECs and p50 values were generated by the TCS Hemox Analysis Software.

### REFERENCES FOR EXAMPLE 5

[0723] 1 Piel, F. B., Steinberg, M. H. & Rees, D. C. Sickle Cell Disease. N Engl J Med 377, 305, doi:10.1056/NEJMc1706325 (2017).
[0724] 2 Richter, M. F. et al. Phage-assisted evolution of an adenine base editor with improved Cas domain compatibility and activity. Nat Biotechnol 38, 883-891, doi:10.1038/s41587-020-0453-z (2020).
[0725] 3 Miller, S. M. et al. Continuous evolution of SpCas9 variants compatible with non-G PAMs. Nat Biotechnol 38, 471-481, doi:10.1038/s41587-020-0412-8 (2020).
[0726] 4 Viprakasit, V., Wiriyasateinkul, A., Sattayasevana, B., Miles, K. L. & Laosombat, V. Hb G-Makassar [beta6(A3)Glu—>Ala; codon 6 (GAG—>GCG)]: molecular characterization, clinical, and hematological effects. Hemoglobin 26, 245-253, doi:10.1081/hem-120015028 (2002).
[0727] 5 Sangkitporn, S., Rerkamnuaychoke, B., Sangkitporn, S., Mitrakul, C. & Sutivigit, Y. Hb G Makassar (beta 6:Glu-Ala) in a Thai family. J Med Assoc Thai 85, 577-582 (2002).
[0728] 6 Nickel, R. S. & Kamani, N. R. Ethical Challenges in Hematopoietic Cell Transplantation for Sickle Cell Disease. Biol Blood Marrow Transplant 24, 219-227, doi:10.1016/j.bbmt.2017.08.034 (2018).
[0729] 7 Kunz, J. B. & Kulozik, A. E. Gene Therapy of the Hemoglobinopathies. Hemasphere 4, e479, doi:10.1097/H59.0000000000000479 (2020).
[0730] 8 Leonard, A., Tisdale, J. & Abraham, A. Curative options for sickle cell disease: haploidentical stem cell transplantation or gene therapy? Br J Haematol 189, 408-423, doi:10.1111/bjh.16437 (2020).
[0731] 9 Magrin, E., Miccio, A. & Cavazzana, M. Lentiviral and genome-editing strategies for the treatment of beta-hemoglobinopathies. Blood 134, 1203-1213, doi:10.1182/blood.2019000949 (2019).
[0732] 10 Demirci, S., Leonard, A., Haro-Mora, J. J., Uchida, N. & Tisdale, J. F. CRISPR/Cas9 for Sickle Cell Disease: Applications, Future Possibilities, and Challenges. Adv Exp Med Biol 1144, 37-52, doi:10.1007/5584_2018_331 (2019).
[0733] 11 Davis, R., Gurumurthy, A., Hossain, M. A., Gunn, E. M. & Bungert, J. Engineering Globin Gene Expression. Mol Ther Methods Clin Dev 12, 102-110, doi:10.1016/j.omtm.2018.12.004 (2019).
[0734] 12 Ribeil, J. A. et al. Gene Therapy in a Patient with Sickle Cell Disease. N Engl J Med 376, 848-855, doi:10.1056/NEJMoa1609677 (2017).
[0735] 13 Esrick, E. B. et al. Post-Transcriptional Genetic Silencing of BCL11A to Treat Sickle Cell Disease. N Engl J Med, doi:10.1056/NEJMoa2029392 (2020).
[0736] 14 Frangoul, H. et al. CRISPR-Cas9 Gene Editing for Sickle Cell Disease and beta-Thalassemia. N Engl J Med, doi:10.1056/NEJMoa2031054 (2020).
[0737] 15 McIntosh, B. E. et al. Nonirradiated NOD,B6.SCID Il2rgamma−/− Kit(W41/W41) (NBSGW) mice support multilineage engraftment of human hematopoietic cells. Stem Cell Reports 4, 171-180, doi:10.1016/j.stemcr.2014.12.005 (2015).
[0738] 16 Park, S. H. et al. Highly efficient editing of the beta-globin gene in patient-derived hematopoietic stem and progenitor cells to treat sickle cell disease. Nucleic Acids Res 47, 7955-7972, doi:10.1093/nar/gkz475 (2019).
[0739] 17 Pattabhi, S. et al. In vivo Outcome of Homology-Directed Repair at the HBB Gene in HSC Using Alternative Donor Template Delivery Methods. Mol Ther Nucleic Acids 17, 277-288, doi:10.1016/j.omtn.2019.05.025 (2019).
[0740] 18 Zuccaro, M. V. et al. Allele-Specific Chromosome Removal after Cas9 Cleavage in Human Embryos. Cell 183, 1650-1664 e1615, doi:10.1016/j.cell.2020.10.025 (2020).
[0741] 19 Song, Y. et al. Large-Fragment Deletions Induced by Cas9 Cleavage while Not in the BEs System. Mol Ther Nucleic Acids 21, 523-526, doi:10.1016/j.omtn.2020.06.019 (2020).
[0742] 20 Adikusuma, F. et al. Large deletions induced by Cas9 cleavage. Nature 560, E8-E9, doi:10.1038/s41586-018-0380-z (2018).
[0743] 21 Kosicki, M., Tomberg, K. & Bradley, A. Repair of double-strand breaks induced by CRISPR-Cas9 leads to large deletions and complex rearrangements. Nat Biotechnol, doi:10.1038/nbt.4192 (2018).
[0744] 22 Haapaniemi, E., Botla, S., Persson, J., Schmierer, B. & Taipale, J. CRISPR-Cas9 genome editing induces a p53-mediated DNA damage response. Nat Med 24, 927-930, doi:10.1038/s41591-018-0049-z (2018).
[0745] 23 Enache, 0. M. et al. Cas9 activates the p53 pathway and selects for p53-inactivating mutations. Nat Genet 52, 662-668, doi:10.1038/s41588-020-0623-4 (2020).
[0746] 24 Ihry, R. J. et al. p53 inhibits CRISPR-Cas9 engineering in human pluripotent stem cells. Nat Med 24, 939-946, doi:10.1038/s41591-018-0050-6 (2018).
[0747] 25 Kurup, S. P., Moioffer, S. J., Pewe, L. L. & Harty, J. T. p53 Hinders CRISPR/Cas9-Mediated Targeted Gene Disruption in Memory CD8 T Cells In vivo. J Immunol 205, 2222-2230, doi:10.4049/jimmuno1.2000654 (2020).
[0748] 26 Gaudelli, N. M. et al. Programmable base editing of A*T to G*C in genomic DNA without DNA cleavage. Nature 551, 464-471, doi:10.1038/nature24644 (2017).
[0749] 27 Huang, T. P. et al. Circularly permuted and PAM-modified Cas9 variants broaden the targeting scope of base editors. Nat Biotechnol 37, 626-631, doi:10.1038/s41587-019-0134-y (2019).
[0750] 28 Anzalone, A. V., Koblan, L. W. & Liu, D. R. Genome editing with CRISPR-Cas nucleases, base editors, transposases and prime editors. Nat Biotechnol 38, 824-844, doi:10.1038/s41587-020-0561-9 (2020).
[0751] 29 Rees, H. A. & Liu, D. R. Base editing: precision chemistry on the genome and transcriptome of living cells. Nat Rev Genet 19, 770-788, doi:10.1038/s41576-018-0059-1 (2018).
[0752] 30 Giardine, B. et al. Updates of the HbVar database of human hemoglobin variants and thalassemia mutations. Nucleic Acids Res 42, D1063-1069, doi:10.1093/nar/gkt911 (2014).
[0753] 31 Hardison, R. C. et al. HbVar: A relational database of human hemoglobin variants and thalassemia mutations at the globin gene server. Hum Mutat 19, 225-233, doi:10.1002/humu.10044 (2002).
[0754] 32 Wu, L. C. et al. Correction of sickle cell disease by homologous recombination in embryonic stem cells. Blood 108, 1183-1188, doi:10.1182/blood-2006-02-004812 (2006).
[0755] 33 Hendel, A. et al. Chemically modified guide RNAs enhance CRISPR-Cas genome editing in human primary cells. Nat Biotechnol 33, 985-989, doi:10.1038/nbt.3290 (2015).
[0756] 34 Traxler, E. A. et al. A genome-editing strategy to treat β-hemoglobinopathies that recapitulates a mutation associated with a benign genetic condition. Nature medicine 22, 987 (2016).
[0757] 35 Hu, J. et al. Isolation and functional characterization of human erythroblasts at distinct stages: implications for understanding of normal and disordered erythropoiesis in vivo. Blood 121, 3246-3253, doi:10.1182/blood-2013-01-476390 (2013).
[0758] 36 Hwang, G. H., Kim, J. S. & Bae, S. Web-Based CRISPR Toolkits: Cas-OFFinder, Cas-Designer, and Cas-Analyzer. Methods Mol Biol 2162, 23-33, doi:10.1007/978-1-0716-0687-2_2 (2021).
[0759] 37 Bae, S., Park, J. & Kim, J. S. Cas-OFFinder: a fast and versatile algorithm that searches for potential off-target sites of Cas9 RNA-guided endonucleases. Bioinformatics 30, 1473-1475, doi:10.1093/bioinformatics/btu048 (2014).
[0760] 38 Tsai, S. Q. et al. CIRCLE-seq: a highly sensitive in vitro screen for genome-wide CRISPR-Cas9 nuclease off-targets. Nat Methods 14, 607-614, doi:10.1038/nmeth.4278 (2017).
[0761] 39 Lazzarotto, C. R. et al. Defining CRISPR-Cas9 genome-wide nuclease activities with CIRCLE-seq. Nat Protoc 13, 2615-2642, doi:10.1038/s41596-018-0055-0 (2018).
[0762] 40 Kuscu, C., Arslan, S., Singh, R., Thorpe, J. & Adli, M. Genome-wide analysis reveals characteristics of off-target sites bound by the Cas9 endonuclease. Nat Biotechnol 32, 677-683, doi:10.1038/nbt.2916 (2014).
[0763] 41 Tsai, S. Q. et al. GUIDE-seq enables genome-wide profiling of off-target cleavage by CRISPR-Cas nucleases. Nat Biotechnol 33, 187-197, doi:10.1038/nbt.3117 (2015).
[0764] 42 Rees, H. A. et al. Improving the DNA specificity and applicability of base editing through protein engineering and protein delivery. Nat Commun 8, 15790, doi:10.1038/ncomms15790 (2017).
[0765] 43 Zuris, J. A. et al. Cationic lipid-mediated delivery of proteins enables efficient protein-based genome editing in vitro and in vivo. Nat Biotechnol 33, 73-80, doi:10.1038/nbt.3081 (2015).
[0766] 44 Luc, S. et al. Bc111a Deficiency Leads to Hematopoietic Stem Cell Defects with an Aging-like Phenotype. Cell Rep 16, 3181-3194, doi:10.1016/j.celrep.2016.08.064 (2016).
[0767] 45 Harrington, D. J., Adachi, K. & Royer, W. E., Jr. The high resolution crystal structure of deoxyhemoglobin S. J Mol Biol 272, 398-407, doi:10.1006/jmbi.1997.1253 (1997).
[0768] 46 Pagnier, J., Bihoreau, M. T., Baudin, V., Edelstein, S. J. & Poyart, C. [Polymerization and solubility of recombinant hemoglobins alpha 2 beta 2 6 Glu—>Ala (Hb Makassar) and alpha 2 beta 2 6 Glu—>A1a, 23 Val—>Ile]. C R Acad Sci III 316, 431-436 (1993).
[0769] 47 Weber, L. et al. Editing a gamma-globin repressor binding site restores fetal hemoglobin synthesis and corrects the sickle cell disease phenotype. Sci Adv 6, doi:10.1126/sciadv.aay9392 (2020).
[0770] 48 Demirci, S. et al. betaT87Q-Globin Gene Therapy Reduces Sickle Hemoglobin Production, Allowing for Ex vivo Anti-sickling Activity in Human Erythroid Cells. Mol Ther Methods Clin Dev 17, 912-921, doi:10.1016/j.omtm.2020.04.013 (2020).
[0771] 49 Wu, Y. et al. Highly efficient therapeutic gene editing of human hematopoietic stem cells. Nat Med 25, 776-783, doi:10.1038/s41591-019-0401-y (2019).
[0772] 50 Magnani, A. et al. Extensive multilineage analysis in patients with mixed chimerism after allogeneic transplantation for sickle cell disease: insight into hematopoiesis and engraftment thresholds for gene therapy. Haematologica 105, 1240-1247, doi:10.3324/haemato1.2019.227561 (2020).
[0773] 51 Abraham, A. et al. Relationship between Mixed Donor-Recipient Chimerism and Disease Recurrence after Hematopoietic Cell Transplantation for Sickle Cell Disease. Biol Blood Marrow Transplant 23, 2178-2183, doi:10.1016/j.bbmt.2017.08.038 (2017).
[0774] 52 Hacein-Bey-Abina, S. et al. LMO2-associated clonal T cell proliferation in two patients after gene therapy for SCID-X₁. Science 302, 415-419, doi:10.1126/science.1088547 (2003).
[0775] 53 Howe, S. J. et al. Insertional mutagenesis combined with acquired somatic mutations causes leukemogenesis following gene therapy of SCID-X₁ patients. J Clin Invest 118, 3143-3150, doi:10.1172/JCI35798 (2008).
[0776] 54 Stein, S. et al. Genomic instability and myelodysplasia with monosomy 7 consequent to EVI1 activation after gene therapy for chronic granulomatous disease. Nat Med 16, 198-204, doi:10.1038/nm.2088 (2010).
[0777] 55 Shen, M. W. et al. Predictable and precise template-free CRISPR editing of pathogenic variants. Nature, doi:10.1038/s41586-018-0686-x (2018).
[0778] 56 Webber, B. R. et al. Highly efficient multiplex human T cell engineering without double-strand breaks using Cas9 base editors. Nat Commun 10, 5222, doi:10.1038/s41467-019-13007-6 (2019).
[0779] 57 Cheng, L. et al. Single-nucleotide-level mapping of DNA regulatory elements that control fetal hemoglobin expression. Nature Genetics (in revision) (2021).
[0780] 58 Gaudelli, N. M. et al. Directed evolution of adenine base editors with increased activity and therapeutic application. Nat Biotechnol 38, 892-900, doi:10.1038/s41587-020-0491-6 (2020).
[0781] 59 Grunewald, J. et al. CRISPR DNA base editors with reduced RNA off-target and self-editing activities. Nat Biotechnol 37, 1041-1048, doi:10.1038/s41587-019-0236-6 (2019).
[0782] 60 Yu, Y. et al. Cytosine base editors with minimized unguided DNA and RNA off-target events and high on-target activity. Nat Commun 11, 2052, doi:10.1038/s41467-020-15887-5 (2020).
[0783] 61 Doman, J. L., Raguram, A., Newby, G. A. & Liu, D. R. Evaluation and minimization of Cas9-independent off-target DNA editing by cytosine base editors. Nat Biotechnol 38, 620-628, doi:10.1038/s41587-020-0414-6 (2020).
[0784] 62 Kumar, S. & Geiger, H. HSC Niche Biology and HSC Expansion Ex vivo. Trends Mol Med 23, 799-819, doi:10.1016/j.molmed.2017.07.003 (2017).
[0785] 63 Li, C. et al. Reactivation of gamma-globin in adult beta-YAC mice after ex vivo and in vivo hematopoietic stem cell genome editing. Blood 131, 2915-2928, doi:10.1182/blood-2018-03-838540 (2018).
[0786] 64 Levy, J. M. et al. Cytosine and adenine base editing of the brain, liver, retina, heart and skeletal muscle of mice via adeno-associated viruses. Nat Biomed Eng 4, 97-110, doi:10.1038/s41551-019-0501-5 (2020).
[0787] 65 Chatterjee, S., Sivanandam, V. & Wong Kk, Jr. Adeno-Associated Virus and Hematopoietic Stem Cells: The Potential of Adeno-Associated Virus Hematopoietic Stem Cells in Genetic Medicines. Hum Gene Ther 31, 542-552, doi:10.1089/hum.2020.049 (2020).
[0788] 66 Koblan, L. W. et al. In vivo Adenine Base Editing Corrects Hutchinson-Gilford Progeria Syndrome. Nature In press. (2020).
[0789] 67 Komor, A. C., Kim, Y. B., Packer, M. S., Zuris, J. A. & Liu, D. R. Programmable editing of a target base in genomic DNA without double-stranded DNA cleavage. Nature 533, 420-424, doi:10.1038/nature17946 (2016).
[0790] 68 Clement, K. et al. CRISPResso2 provides accurate and rapid genome editing sequence analysis. Nat Biotechnol 37, 224-226, doi:10.1038/s41587-019-0032-3 (2019).
[0791] 69 Vaidyanathan, S. et al. Uridine Depletion and Chemical Modification Increase Cas9 mRNA Activity and Reduce Immunogenicity without HPLC Purification. Mol Ther Nucleic Acids 12, 530-542, doi:10.1016/j.omtn.2018.06.010 (2018).
[0792] 70 Connelly, J. P. & Pruett-Miller, S. M. CRIS.py: A Versatile and High-throughput Analysis Program for CRISPR-based Genome Editing. Sci Rep 9, 4194, doi:10.1038/s41598-019-40896-w (2019).
[0793] 71 Heinz, S. et al. Simple combinations of lineage-determining transcription factors prime cis-regulatory elements required for macrophage and B cell identities. Mol Cell 38, 576-589, doi:10.1016/j.molce1.2010.05.004 (2010).
[0794] 72 Leonard, A. et al. Low-Dose Busulfan Reduces Human CD34(+) Cell Doses Required for Engraftment in c-kit Mutant Immunodeficient Mice. Mol Ther Methods Clin Dev 15, 430-437, doi:10.1016/j.omtm.2019.10.017 (2019).

### Other Embodiments and Equivalents

[0795] The foregoing has been a description of certain non-limiting embodiments of the disclosure. Those of ordinary skill in the art will appreciate that various changes and modifications to this description may be made without departing from the spirit or scope of the present disclosure, as defined in the following claims.

[0796] In the claims articles such as “a,” “an,” and “the” may mean one or more than one unless indicated to the contrary or otherwise evident from the context. Claims or descriptions that include “or” between one or more members of a group are considered satisfied if one, more than one, or all of the group members are present in, employed in, or otherwise relevant to a given product or process unless indicated to the contrary or otherwise evident from the context. The disclosure includes embodiments in which exactly one member of the group is present in, employed in, or otherwise relevant to a given product or process. The disclosure includes embodiments in which more than one, or all of the group members are present in, employed in, or otherwise relevant to a given product or process.

[0797] Furthermore, the disclosure encompasses all variations, combinations, and permutations in which one or more limitations, elements, clauses, and descriptive terms from one or more of the listed claims is introduced into another claim. For example, any claim that is dependent on another claim can be modified to include one or more limitations found in any other claim that is dependent on the same base claim. Where elements are presented as lists, e.g., in Markush group format, each subgroup of the elements is also disclosed, and any element(s) can be removed from the group. It should it be understood that, in general, where the disclosure, or aspects of the disclosure, is/are referred to as comprising particular elements and/or features, certain embodiments of the disclosure or aspects of the disclosure consist, or consist essentially of, such elements and/or features. For purposes of simplicity, those embodiments have not been specifically set forth in haec verba herein. It is also noted that the terms “comprising” and “containing” are intended to be open and permits the inclusion of additional elements or steps. Where ranges are given, endpoints are included. Furthermore, unless otherwise indicated or otherwise evident from the context and understanding of one of ordinary skill in the art, values that are expressed as ranges can assume any specific value or sub-range within the stated ranges in different embodiments of the disclosure, to the tenth of the unit of the lower limit of the range, unless the context clearly dictates otherwise.

[0798] This application refers to various issued patents, published patent applications, journal articles, and other publications, all of which are incorporated herein by reference. If there is a conflict between any of the incorporated references and the present disclosure, the disclosure shall control. In addition, any particular embodiment of the present disclosure that falls within the prior art may be explicitly excluded from any one or more of the claims. Because such embodiments are deemed to be known to one of ordinary skill in the art, they may be excluded even if the exclusion is not set forth explicitly herein. Any particular embodiment of the disclosure can be excluded from any claim, for any reason, whether or not related to the existence of prior art.

[0799] Those skilled in the art will recognize or be able to ascertain using no more than routine experimentation many equivalents to the specific embodiments described herein. The scope of the present embodiments described herein is not intended to be limited to the above Description, but rather is as set forth in the appended claims. Those of ordinary skill in the art will appreciate that various changes and modifications to this description may be made without departing from the spirit or scope of the present disclosure, as defined in the following claims.

The application's sequence listing, which the Patent Office published only in electronic form, follows.

SEQUENCE LISTING (499 sequences)

SEQ ID NO: 1 - DNA, 20 bp, Artificial Sequence
  Synthetic
gacaaaccagaagccgctcc

SEQ ID NO: 2 - DNA, 20 bp, Artificial Sequence
  Synthetic
gttcacacccatgacgaaca

SEQ ID NO: 3 - DNA, 20 bp, Artificial Sequence
  Synthetic
gaacacaaagcatagactgc

SEQ ID NO: 4 - DNA, 20 bp, Artificial Sequence
  Synthetic
gaagaccaaggatagactgc

SEQ ID NO: 5 - DNA, 20 bp, Artificial Sequence
  Synthetic
gtggggaaggggcccccaag

SEQ ID NO: 6 - DNA, 20 bp, Artificial Sequence
  Synthetic
ggtgagtgagtgtgtgcgtg

SEQ ID NO: 7 - DNA, 20 bp, Artificial Sequence
  Synthetic
gtcatcttagtcattacctg

SEQ ID NO: 8 - DNA, 22 bp, Artificial Sequence
  Synthetic
gtggtagacagcatgtgtccta

SEQ ID NO: 9 - DNA, 22 bp, Artificial Sequence
  Synthetic
atttacagcctggcctttgggg

SEQ ID NO: 10 - DNA, 22 bp, Artificial Sequence
  Synthetic
ggagagaaagagaagttgattg

SEQ ID NO: 11 - DNA, 22 bp, Artificial Sequence
  Synthetic
gtgtcaggtaatgtgctaaaca

SEQ ID NO: 12 - DNA, 22 bp, Artificial Sequence
  Synthetic
atgcattaactgaaaatggtca

SEQ ID NO: 13 - DNA, 23 bp, Artificial Sequence
  Synthetic
tgctgcaagtaagcatgcatttg

SEQ ID NO: 14 - DNA, 23 bp, Artificial Sequence
  Synthetic
ctagacaggggctagtatgtgca

SEQ ID NO: 15 - DNA, 23 bp, Artificial Sequence
  Synthetic
cagctattcaggctggcccgccc

SEQ ID NO: 16 - DNA, 20 bp, Artificial Sequence
  Synthetic
ggttaacaaggccaaactcc

SEQ ID NO: 17 - DNA, 20 bp, Artificial Sequence
  Synthetic
gggtccagttccgggattag

SEQ ID NO: 18 - DNA, 20 bp, Artificial Sequence
  Synthetic
ggtactggccaaagattcaa

SEQ ID NO: 19 - DNA, 20 bp, Artificial Sequence
  Synthetic
gatgacccgtattatctggc

SEQ ID NO: 20 - DNA, 20 bp, Artificial Sequence
  Synthetic
ggaacaaggtactctttgag

SEQ ID NO: 21 - DNA, 22 bp, Artificial Sequence
  Synthetic
ctggaaaattaccacatgctgt

SEQ ID NO: 22 - DNA, 22 bp, Artificial Sequence
  Synthetic
tacaaacatacagtttaataga

SEQ ID NO: 23 - DNA, 22 bp, Artificial Sequence
  Synthetic
atgagaagtatgacaacagcct

SEQ ID NO: 24 - DNA, 22 bp, Artificial Sequence
  Synthetic
ggcagtcatcttagtcattacc

SEQ ID NO: 25 - DNA, 22 bp, Artificial Sequence
  Synthetic
ccaacatacatgcccctttgcc

SEQ ID NO: 26 - DNA, 22 bp, Artificial Sequence
  Synthetic
ggactagagtaggattgtaccc

SEQ ID NO: 27 - DNA, 22 bp, Artificial Sequence
  Synthetic
gttagacacgcacagcatttca

SEQ ID NO: 28 - DNA, 22 bp, Artificial Sequence
  Synthetic
ggctgagctaactgtgacagca

SEQ ID NO: 29 - DNA, 22 bp, Artificial Sequence
  Synthetic
gggagctcaagcctgattccaa

SEQ ID NO: 30 - DNA, 20 bp, Artificial Sequence
  Synthetic
ggtgggatggggtccccaag

SEQ ID NO: 31 - DNA, 20 bp, Artificial Sequence
  Synthetic
ggtagggagaggcccccaga

SEQ ID NO: 32 - DNA, 20 bp, Artificial Sequence
  Synthetic
ggtggggagcggccccccag

SEQ ID NO: 33 - DNA, 20 bp, Artificial Sequence
  Synthetic
gagtccgagcagaagaagaa

SEQ ID NO: 34 - DNA, 20 bp, Artificial Sequence
  Synthetic
gagttagagcagaagaagaa

SEQ ID NO: 35 - DNA, 20 bp, Artificial Sequence
  Synthetic
gagtctaagcagaagaagaa

SEQ ID NO: 36 - DNA, 20 bp, Artificial Sequence
  Synthetic
gaggccgagcagaagaaaga

SEQ ID NO: 37 - DNA, 21 bp, Artificial Sequence
  Synthetic
gagtgagtgagtgtgtgtgtg

SEQ ID NO: 38 - DNA, 21 bp, Artificial Sequence
  Synthetic
gtgtgagtaagtgtgtgtgtg

SEQ ID NO: 39 - DNA, 20 bp, Artificial Sequence
  Synthetic
ggtgagtgtgtgtgtgcatg

SEQ ID NO: 40 - DNA, 20 bp, Artificial Sequence
  Synthetic
gtggggaaggggcccccaag

SEQ ID NO: 41 - DNA, 20 bp, Artificial Sequence
  Synthetic
atatttgcattgagatagtg

SEQ ID NO: 42 - DNA, 20 bp, Artificial Sequence
  Synthetic
tttatcacaggctccaggaa

SEQ ID NO: 43 - DNA, 61 bp, Artificial Sequence
  Synthetic
  misc_feature (34)..(37): n is a, c, g, or t
acactctttccctacacgacgctcttccgatctnnnnagccctctttttattggaactgtg

SEQ ID NO: 44 - DNA, 57 bp, Artificial Sequence
  Synthetic
  misc_feature (34)..(37): n is a, c, g, or t
acactctttccctacacgacgctcttccgatctnnnnctgactcagccctgcaaagg

SEQ ID NO: 45 - DNA, 57 bp, Artificial Sequence
  Synthetic
  misc_feature (34)..(37): n is a, c, g, or t
acactctttccctacacgacgctcttccgatctnnnnccagccccatctgtcaaact

SEQ ID NO: 46 - DNA, 57 bp, Artificial Sequence
  Synthetic
  misc_feature (34)..(37): n is a, c, g, or t
acactctttccctacacgacgctcttccgatctnnnnttgcttattgctgaggggca

SEQ ID NO: 47 - DNA, 59 bp, Artificial Sequence
  Synthetic
  misc_feature (34)..(37): n is a, c, g, or t
acactctttccctacacgacgctcttccgatctnnnngtagaaatggggtcttgctttg

SEQ ID NO: 48 - DNA, 58 bp, Artificial Sequence
  Synthetic
  misc_feature (34)..(37): n is a, c, g, or t
acactctttccctacacgacgctcttccgatctnnnngtgcagacggcagtcactagg

SEQ ID NO: 49 - DNA, 59 bp, Artificial Sequence
  Synthetic
  misc_feature (34)..(37): n is a, c, g, or t
acactctttccctacacgacgctcttccgatctnnnnaacggaactcaaccattaagca

SEQ ID NO: 50 - DNA, 57 bp, Artificial Sequence
  Synthetic
  misc_feature (34)..(37): n is a, c, g, or t
acactctttccctacacgacgctcttccgatctnnnntgcagtctcctgcttctctg

SEQ ID NO: 51 - DNA, 58 bp, Artificial Sequence
  Synthetic
  misc_feature (34)..(37): n is a, c, g, or t
acactctttccctacacgacgctcttccgatctnnnnggacatttccaccgcaaaatg

SEQ ID NO: 52 - DNA, 57 bp, Artificial Sequence
  Synthetic
  misc_feature (34)..(37): n is a, c, g, or t
acactctttccctacacgacgctcttccgatctnnnntcacttcagcccaggagtat

SEQ ID NO: 53 - DNA, 57 bp, Artificial Sequence
  Synthetic
  misc_feature (34)..(37): n is a, c, g, or t
acactctttccctacacgacgctcttccgatctnnnnctgcacctagcctccatgtc

SEQ ID NO: 54 - DNA, 62 bp, Artificial Sequence
  Synthetic
  misc_feature (34)..(37): n is a, c, g, or t
acactctttccctacacgacgctcttccgatctnnnngattcagtgctcaaaataagttgtc

SEQ ID NO: 55 - DNA, 57 bp, Artificial Sequence
  Synthetic
  misc_feature (34)..(37): n is a, c, g, or t
acactctttccctacacgacgctcttccgatctnnnnatgtgggctgcctagaaagg

SEQ ID NO: 56 - DNA, 57 bp, Artificial Sequence; identical to SEQ ID NO: 55
  Synthetic
  misc_feature (34)..(37): n is a, c, g, or t

SEQ ID NO: 57 - DNA, 57 bp, Artificial Sequence; identical to SEQ ID NO: 45
  Synthetic
  misc_feature (34)..(37): n is a, c, g, or t

SEQ ID NO: 58 - DNA, 59 bp, Artificial Sequence
  Synthetic
  misc_feature (34)..(37): n is a, c, g, or t
acactctttccctacacgacgctcttccgatctnnnngctttaaacatttgtctgtgcg

SEQ ID NO: 59 - DNA, 59 bp, Artificial Sequence; identical to SEQ ID NO: 58
  Synthetic
  misc_feature (34)..(37): n is a, c, g, or t

SEQ ID NO: 60 - DNA, 58 bp, Artificial Sequence
  Synthetic
  misc_feature (34)..(37): n is a, c, g, or t
acactctttccctacacgacgctcttccgatctnnnncagagagagcaggacgtcaca

SEQ ID NO: 61 - DNA, 59 bp, Artificial Sequence
  Synthetic
  misc_feature (34)..(37): n is a, c, g, or t
acactctttccctacacgacgctcttccgatctnnnncactgctgaaccagtcaaactc

SEQ ID NO: 62 - DNA, 59 bp, Artificial Sequence
  Synthetic
  misc_feature (34)..(37): n is a, c, g, or t
acactctttccctacacgacgctcttccgatctnnnngacagagggagagaaacagagc

SEQ ID NO: 63 - DNA, 59 bp, Artificial Sequence; identical to SEQ ID NO: 47
  Synthetic
  misc_feature (34)..(37): n is a, c, g, or t

SEQ ID NO: 64 - DNA, 57 bp, Artificial Sequence; identical to SEQ ID NO: 52
  Synthetic
  misc_feature (34)..(37): n is a, c, g, or t

SEQ ID NO: 65 - DNA, 57 bp, Artificial Sequence; identical to SEQ ID NO: 44
  Synthetic
  misc_feature (34)..(37): n is a, c, g, or t

SEQ ID NO: 66 - DNA, 57 bp, Artificial Sequence
  Synthetic
  misc_feature (34)..(37): n is a, c, g, or t
acactctttccctacacgacgctcttccgatctnnnnacgtctcatatgccccttgg

SEQ ID NO: 67 - DNA, 57 bp, Artificial Sequence; identical to SEQ ID NO: 50
  Synthetic
  misc_feature (34)..(37): n is a, c, g, or t

SEQ ID NO: 68 - DNA, 57 bp, Artificial Sequence
  Synthetic
  misc_feature (34)..(37): n is a, c, g, or t
acactctttccctacacgacgctcttccgatctnnnnccctgttcctaaagcccacc

SEQ ID NO: 69 - DNA, 57 bp, Artificial Sequence
  Synthetic
  misc_feature (34)..(37): n is a, c, g, or t
acactctttccctacacgacgctcttccgatctnnnnagagactgattgcgtggagt

SEQ ID NO: 70 - DNA, 57 bp, Artificial Sequence; identical to SEQ ID NO: 45
  Synthetic
  misc_feature (34)..(37): n is a, c, g, or t

SEQ ID NO: 71 - DNA, 57 bp, Artificial Sequence
  Synthetic
  misc_feature (34)..(37): n is a, c, g, or t
acactctttccctacacgacgctcttccgatctnnnncgcgggctgaagtagatcaa

SEQ ID NO: 72 - DNA, 57 bp, Artificial Sequence
  Synthetic
  misc_feature (34)..(37): n is a, c, g, or t
acactctttccctacacgacgctcttccgatctnnnnatggctgcaaatccaagggt

SEQ ID NO: 73 - DNA, 57 bp, Artificial Sequence
  Synthetic
  misc_feature (34)..(37): n is a, c, g, or t
acactctttccctacacgacgctcttccgatctnnnngaggttgaaactcctcgcca

SEQ ID NO: 74 - DNA, 57 bp, Artificial Sequence
  Synthetic
  misc_feature (34)..(37): n is a, c, g, or t
acactctttccctacacgacgctcttccgatctnnnnggctgtccctggttgtctgg

SEQ ID NO: 75 - DNA, 57 bp, Artificial Sequence
  Synthetic
  misc_feature (34)..(37): n is a, c, g, or t
acactctttccctacacgacgctcttccgatctnnnncagctcagcctgagtgttga

SEQ ID NO: 76 - DNA, 62 bp, Artificial Sequence
  Synthetic
  misc_feature (34)..(37): n is a, c, g, or t
acactctttccctacacgacgctcttccgatctnnnngtggggagatttgcatctgtggagg

SEQ ID NO: 77 - DNA, 61 bp, Artificial Sequence
  Synthetic
  misc_feature (34)..(37): n is a, c, g, or t
acactctttccctacacgacgctcttccgatctnnnncaatgtgcttcaacccatcacggc

SEQ ID NO: 78 - DNA, 61 bp, Artificial Sequence
  Synthetic
  misc_feature (34)..(37): n is a, c, g, or t
acactctttccctacacgacgctcttccgatctnnnngagaaggaggtgcaggagctagac

SEQ ID NO: 79 - DNA, 57 bp, Artificial Sequence
  Synthetic
  misc_feature (34)..(37): n is a, c, g, or t
acactctttccctacacgacgctcttccgatctnnnngctcatttcctacggcccag

SEQ ID NO: 80 - DNA, 59 bp, Artificial Sequence
  Synthetic
  misc_feature (34)..(37): n is a, c, g, or t
acactctttccctacacgacgctcttccgatctnnnngccacaggcactaacttcttca

SEQ ID NO: 81 - DNA, 59 bp, Artificial Sequence
  Synthetic
  misc_feature (34)..(37): n is a, c, g, or t
acactctttccctacacgacgctcttccgatctnnnngcgctttccctttgctagaatc

SEQ ID NO: 82 - DNA, 58 bp, Artificial Sequence
  Synthetic
  misc_feature (34)..(37): n is a, c, g, or t
acactctttccctacacgacgctcttccgatctnnnntcttagacataacacaccagg

SEQ ID NO: 83 - DNA, 58 bp, Artificial Sequence; identical to SEQ ID NO: 82
  Synthetic
  misc_feature (34)..(37): n is a, c, g, or t

SEQ ID NO: 84 - DNA, 57 bp, Artificial Sequence
  Synthetic
  misc_feature (34)..(37): n is a, c, g, or t
acactctttccctacacgacgctcttccgatctnnnncctggcctcactggatactc

SEQ ID NO: 85 - DNA, 49 bp, Artificial Sequence
  Synthetic
tggagttcagacgtgtgctcttccgatctccgactggtccacttaccta

SEQ ID NO: 86 - DNA, 48 bp, Artificial Sequence
  Synthetic
tggagttcagacgtgtgctcttccgatctcaagtcaggggagcgtgtc

SEQ ID NO: 87 - DNA, 54 bp, Artificial Sequence
  Synthetic
tggagttcagacgtgtgctcttccgatcttgaatggattccttggaaacaatga

SEQ ID NO: 88 - DNA, 49 bp, Artificial Sequence
  Synthetic
tggagttcagacgtgtgctcttccgatctacctctctcctccagctgag

SEQ ID NO: 89 - DNA, 52 bp, Artificial Sequence
  Synthetic
tggagttcagacgtgtgctcttccgatctttgagtctatcgagtgtgtgcat

SEQ ID NO: 90 - DNA, 52 bp, Artificial Sequence
  Synthetic
tggagttcagacgtgtgctcttccgatctctattggaatcctggagtgaccc

SEQ ID NO: 91 - DNA, 53 bp, Artificial Sequence
  Synthetic
tggagttcagacgtgtgctcttccgatctccaacatacagaagtcaggaatgc

SEQ ID NO: 92 - DNA, 48 bp, Artificial Sequence
  Synthetic
tggagttcagacgtgtgctcttccgattggtggagtgctctgtgtttg

SEQ ID NO: 93 - DNA, 47 bp, Artificial Sequence
  Synthetic
tggagttcagacgtgtgctcttccgatgctacagaaaggtcagcagc

SEQ ID NO: 94 - DNA, 51 bp, Artificial Sequence
  Synthetic
tggagttcagacgtgtgctcttccgatcttgtgtatggtgagaggtaggga

SEQ ID NO: 95 - DNA, 49 bp, Artificial Sequence
  Synthetic
tggagttcagacgtgtgctcttccgatctgctgtggcatccagagacat

SEQ ID NO: 96 - DNA, 54 bp, Artificial Sequence
  Synthetic
tggagttcagacgtgtgctcttccgatctattgacattccctaacttcaacgta

SEQ ID NO: 97 - DNA, 49 bp, Artificial Sequence
  Synthetic
tggagttcagacgtgtgctcttccgatctcccagccaaacttgtcaacc

SEQ ID NO: 98 - DNA, 49 bp, Artificial Sequence; identical to SEQ ID NO: 97
  Synthetic

SEQ ID NO: 99 - DNA, 54 bp, Artificial Sequence; identical to SEQ ID NO: 87
  Synthetic

SEQ ID NO: 100 - DNA, 51 bp, Artificial Sequence
  Synthetic
tggagttcagacgtgtgctcttccgatctgttttctgtccctccctcagta

SEQ ID NO: 101 - DNA, 51 bp, Artificial Sequence; identical to SEQ ID NO: 100
  Synthetic

SEQ ID NO: 102 - DNA, 51 bp, Artificial Sequence
  Synthetic
tggagttcagacgtgtgctcttccgatctagcactacctacgtcagcacct

SEQ ID NO: 103 - DNA, 51 bp, Artificial Sequence
  Synthetic
tggagttcagacgtgtgctcttccgatctggcatggggaaatataaacttg

SEQ ID NO: 104 - DNA, 51 bp, Artificial Sequence
  Synthetic
tggagttcagacgtgtgctcttccgatctttctagatgccgacaaaaggat

SEQ ID NO: 105 - DNA, 52 bp, Artificial Sequence; identical to SEQ ID NO: 89
  Synthetic

SEQ ID NO: 106 - DNA, 51 bp, Artificial Sequence; identical to SEQ ID NO: 94
  Synthetic

SEQ ID NO: 107 - DNA, 48 bp, Artificial Sequence; identical to SEQ ID NO: 86
  Synthetic

SEQ ID NO: 108 - DNA, 51 bp, Artificial Sequence
  Synthetic
tggagttcagacgtgtgctcttccgatctacgtaggaattttggtgggaca

SEQ ID NO: 109 - DNA, 48 bp, Artificial Sequence; identical to SEQ ID NO: 92
  Synthetic

SEQ ID NO: 110 - DNA, 49 bp, Artificial Sequence
  Synthetic
tggagttcagacgtgtgctcttccgatctactggttctgtttgtggcca

SEQ ID NO: 111 - DNA, 49 bp, Artificial Sequence
  Synthetic
tggagttcagacgtgtgctcttccgatctcactccagcctaggcaacaa

SEQ ID NO: 112 - DNA, 54 bp, Artificial Sequence; identical to SEQ ID NO: 87
  Synthetic

SEQ ID NO: 113 - DNA, 52 bp, Artificial Sequence
  Synthetic
tggagttcagacgtgtgctcttccgatctcctgtctctgctcctttgtcccc

SEQ ID NO: 114 - DNA, 49 bp, Artificial Sequence
  Synthetic
tggagttcagacgtgtgctcttccgatctaaatgcttctcgggctctcc

SEQ ID NO: 115 - DNA, 53 bp, Artificial Sequence
  Synthetic
tggagttcagacgtgtgctcttccgatctggaattaagatgcaactgagagta

SEQ ID NO: 116 - DNA, 49 bp, Artificial Sequence
  Synthetic
tggagttcagacgtgtgctcttccgatctcgagcactgaggcctggtta

SEQ ID NO: 117 - DNA, 48 bp, Artificial Sequence
  Synthetic
tggagttcagacgtgtgctcttccgatctctcgtgggtttgtggttgc

SEQ ID NO: 118 - DNA, 55 bp, Artificial Sequence
  Synthetic
tggagttcagacgtgtgctcttccgatctgcttttataccatcttggggttacag

SEQ ID NO: 119 - DNA, 56 bp, Artificial Sequence
  Synthetic
tggagttcagacgtgtgctcttccgatctccatgaatttgtgatggatgcagtctg

SEQ ID NO: 120 - DNA, 53 bp, Artificial Sequence
  Synthetic
tggagttcagacgtgtgctcttccgatctcatcccgaccttcatccctcctgg

SEQ ID NO: 121 - DNA, 49 bp, Artificial Sequence
  Synthetic
tggagttcagacgtgtgctcttccgatctctgcagtgaggaggtggttc

SEQ ID NO: 122 - DNA, 51 bp, Artificial Sequence
  Synthetic
tggagttcagacgtgtgctcttccgatctgatgaagctgcctttcctaagc

SEQ ID NO: 123 - DNA, 53 bp, Artificial Sequence
  Synthetic
tggagttcagacgtgtgctcttccgatctctcagcaatgcttatattactggc

SEQ ID NO: 124 - DNA, 46 bp, Artificial Sequence
  Synthetic
tggagttcagacgtgtgctcttccgatctgtctgccagtcctcttc

SEQ ID NO: 125 - DNA, 46 bp, Artificial Sequence; identical to SEQ ID NO: 124
  Synthetic

SEQ ID NO: 126 - DNA, 52 bp, Artificial Sequence
  Synthetic
tggagttcagacgtgtgctcttccgatctctgacaaaagaagtcctggtatc

SEQ ID NO: 127 - DNA, 246 bp, Artificial Sequence
  Synthetic
ccgactggtccacttacctatcacaatcacaactgcaatattacataaatagtctgttagagaaggacaactgaatctgcaaatcagtatcttctcaatgagagtacaaggaggcaatggctacatacgatggacaaaccagaagccgctcctgggctatgtttactatttacttttatggtataaaaatgttctcagtcaagcagtttcaacaatagataccacagttccaataaaaagagggct

SEQ ID NO: 128 - DNA, 243 bp, Artificial Sequence
  Synthetic
gcaagtcaggggagcgtgtccatagggtgccaggctggccgcttctccacgggccctgccttcctcacctgatgatcttgaggctgttgtcatacttctcatggttcacacccatgacgaacatgggggcatcagcagagggggcagagatgatgacccttttggctcccccctgcaaatgagcctacagcagagaagcagacagttatgaacccgggtcctgcctttgcagggctgagtcag

SEQ ID NO: 129 - DNA, 155 bp, Artificial Sequence
  Synthetic
taacaagacctggctgagctaactgtgacagcatgtggtaattttccagcccgctggccctgtaaaggaaactggaacacaaagcatagactgcggggcgggccagcctgaatagctgcaaacaagtgcagaatatctgatgatgtcatacgcac

SEQ ID NO: 130 - DNA, 196 bp, Artificial Sequence
  Synthetic
aagtgaagaccaaggatagactgctgggcttgacagcatggagggtgctgggggcctaggcaagtgcaatattcatgtggtgtcattgggccaaaggtgtcattggagagtactcaaaaaacactaggagaggagctgagctttgtcaggcgtgtaggaagatggaggagaagaaaagggggagtggtggtgggct

SEQ ID NO: 131 - DNA, 178 bp, Artificial Sequence
  Synthetic
gtggagtttagccagggaccgtttcagacagatatttgcattgagatagtgtggggaaggggcccccaagaggatactgctgcttaattttttttatagcctttgccttgttccgattcagtcattccaatttttctctaatttattcttccctttagctagttttcttctcccacca

SEQ ID NO: 132 - DNA, 178 bp, Artificial Sequence
  Synthetic
gtgcagacggcagtcactagggggcgctcggccaccacagggaagctgggtgaatggagcgagcagcgtcttcgagagtgaggacgtgtgtgtctgtgtgggtgagtgagtgtgtgcgtgtggggttgagggcgttggagcggggagaaggccaggggtcactccaggattccaatag

SEQ ID NO: 133 - DNA, 200 bp, Artificial Sequence
  Synthetic
ccaacatacagaagtcaggaatgcttgaatataaatttattattactctatgttctatttaagttttcatgttctaaaaatgtatcccagtttacacgtctcatatgccccttggcagtcatcttagtcattacctgaggtgttcgttgtaactcatataaactgagttcccatgttttgcttaatggttgagttccgtt

SEQ ID NO: 134 - DNA, 271 bp, Artificial Sequence
  Synthetic
tggtggagtgctctgtgtttgtctttataaacccagatgagaggatgaaggcaacaagcttctgtaccaacatacatgcccctttgcctcaagtctggttattttagggggatgctaggttgctttgggtctaccttactgagaaaatggccccaggtcattgtcatgtccagttgtggtagacagcatgtgtcctaaagggtatattcacatgcatgtgcaaaaatacaggggtccttctaaccctatcacagagaagcaggagactgca

SEQ ID NO: 135 - DNA, 255 bp, Artificial Sequence
  Synthetic
gctacagaaaggtcagcagctatatttaacctcagaccagggtgcggtgggagatctggtttccggaagacggaatggggagaagggcaggttccccgaggcgcccagacacccaatcctcccggtgacatttacagcctggcctttggggtcgggtcaacgctaggctggcaggggaagggcggggccgtgaggtgagccggcgctgcaggaaggggccaccaccagaggggccattttgcggtggaaatgtcc

SEQ ID NO: 136 - DNA, 232 bp, Artificial Sequence
  Synthetic
aacaaatgtgaaaaaaaacaagtatcaaatgttctcactcacatgtggaaactaaaaaagtggatctcatgaagatagagaatagactgctggttactagaggtcaggaagagtagaggggtgggggagagaaagagaagttgattgatgggtacaaacatacagtttaatagaagaagtatgacccagtgtttgatagatcagtagggtgactacagtttacaaccatgta

SEQ ID NO: 137 - DNA, 240 bp, Artificial Sequence
  Synthetic
aagtgttcagctgcttttctttcatttattccacatataattactataattgctaaacatttatttagtgtcaggtaatgtgctaaacagagagttactgctcagacatgtaataataataaataacacatcaaataaccataccattttaagctgtagtattatgaagggaaatctggagcaaagagaatagactgtagggaaaccagttaagaaataggacatggaggctaggtgcag

SEQ ID NO: 138 - DNA, 190 bp, Artificial Sequence
  Synthetic
attgacattccctaacttcaacgtaccgagtaaggaaattctttgtcctgagatcacagacaaatgggattgtatgcattaactgaaaatggtcaaggagtcagtactgaagatcagcaatgccaagggtaaacggaatatcccagtataataggataagcaatggacaacttattttgagcactgaatc

SEQ ID NO: 139 - DNA, 297 bp, Artificial Sequence
  Synthetic
atgtgggctgcctagaaaggcatggatgagagaagcctggagacagggatcccagggaaacgcccatgcaattagtctatttctgctgcaagtaagcatgcatttgtaggcttgatgctttttttctgcttctccagccctggcctgggtcaatccttggggcccagactgagcacgtgatggcagaggaaaggaagccctgcttcctccagagggcgtcgcaggacagcttttcctagacaggggctagtatgtgcagctcctgcaccgggatactggttgacaagtttggctggg

SEQ ID NO: 140 - DNA, 297 bp, Artificial Sequence; identical to SEQ ID NO: 139
  Synthetic

SEQ ID NO: 141 - DNA, 155 bp, Artificial Sequence
  Synthetic
gtgcgtatgacatcatcagatattctgcacttgtttgcagctattcaggctggcccgccccgcagtctatgctttgtgttccagtttcctttacagggccagcgggctggaaaattaccacatgctgtcacagttagctcagccaggtcttgtta

SEQ ID NO: 142 - DNA, 260 bp, Artificial Sequence
  Synthetic
gctttaaacatttgtctgtgcgtcaatgctttaaagggacatactatgtggtgattcattttcaaagtaagaatttgcagaaaatgagaaacaaactttctgaacaatacaattttaatgcatactaaggctggttaactggttagaatactaggttaacaaggccaaactccagataggccaacagcttttcaaaccaatattcctgacactgccaggaataaagaaaactcttcactactgagggagggacagaaaac

SEQ ID NO: 143 - DNA, 231 bp, Artificial Sequence
  Synthetic
agcactacctacgtcagcacctgggaccccgccaccgtgcgccgggccttgcagtgggcgcgctacctgcgccacatccatcggcgctttggtcggcatggccccattcgcacggctctggagcggcggctgcacaaccagtggaggcaagagggcggctttgggcggggtccagttccgggattagcgaacttccaggccctcggtcactgtgacgtcctgctctctctg

SEQ ID NO: 144 - DNA, 274 bp, Artificial Sequence
  Synthetic
cactgctgaaccagtcaaactccaactctaagcatggagtttcctaagagatggaagaaaagctattatatatacataagagagaaggtttgactgccataaaaaatatctaatttatgacaataaaaaccttactttatttggatttgatccagtaacaccaatagggttcagcaaatcttctaatccatgaggtactggccaaagattcaaagccatttttccagatactagagtgtctgtgtaatcaaacaagtttatatttccccatgcc

SEQ ID NO: 145 - DNA, 242 bp, Artificial Sequence
  Synthetic
ttctagatgccgacaaaaggatcaaggtggcgaagcccgtggtggagatggatggtgatgagatgacccgtattatctggcagttcatcaaggagaaggtagtgccccctcctgaagtgggtggctctccaggtgggctggccagggattgttctgtcccacagggtcttctggactgcaggtccctaggacccccccgttgtcctggtaggcagcagcagctctgtttctctccctctgtc

SEQ ID NO: 146 - DNA, 278 bp, Artificial Sequence
  Synthetic
gtagaaatggggtcttgctttgttgcccaggctggtctaaaaaaatatactacttttatggatcatactgctaaacactaatataacctttggaaatataaatctatatacttccttacctgggattggaacaaggtactctttgagtgttcacattgtcacataagggttctcctccatggtagatacctgttcgaacatagatctaaaagaaaaaagtaggtatatactaatgtatacactcaacatacacatatgcacacactcgatagactcaa

SEQ ID NO: 147 - DNA, 155 bp, Artificial Sequence; identical to SEQ ID NO: 141
  Synthetic

SEQ ID NO: 148 - DNA, 232 bp, Artificial Sequence; identical to SEQ ID NO: 136
  Synthetic

SEQ ID NO: 149 - DNA, 243 bp, Artificial Sequence
  Synthetic
ctgactcagccctgcaaaggcaggacccgggttcataactgtctgcttctctgctgtaggctcatttgcaggggggagccaaaagggtcatcatctctgccccctctgctgatgcccccatgttcgtcatgggtgtgaaccatgagaagtatgacaacagcctcaagatcatcaggtgaggaaggcagggcccgtggagaagcggccagcctggcaccctatggacacgctcccctgacttgc

SEQ ID NO: 150 - DNA, 206 bp, Artificial Sequence
  Synthetic
acgtctcatatgccccttggcagtcatcttagtcattacctgaggtgttcgttgtaactcatataaactgagttcccatgttttgcttaatggttgagttccgtttgtctgcacagcctgagacattgctggaaataaagaagagagaaaaacaattttagtatttggaagggaagtgctatggtctgaatgtatgtgtcccacca

SEQ ID NO: 151 - DNA, 271 bp, Artificial Sequence; identical to SEQ ID NO: 134
  Synthetic

SEQ ID NO: 152 - DNA, 113 bp, Artificial Sequence
  Synthetic
agaattgctgtcagtactaaccagctatttcatagctgttgcatgaggaaagggactagagtaggattgtacccctcagtctatgctttgtttactctgagtgtacaaaagat

SEQ ID NO: 153 - DNA, 184 bp, Artificial Sequence
  Synthetic
tcatggagtatgaggcatagactgcaggagacatcaaaccatgacttgcagatgaagaagcattttaaaagttagacacgcacagcatttcaggaagttatatataaggagtgttatagaagataacacctctaaaatgtgtagtatatatatcaggggttttttttgagacagagttttgctc

SEQ ID NO: 154 - DNA, 200 bp, Artificial Sequence
  Synthetic
tgaatggattccttggaaacaatgataacaagacctggctgagctaactgtgacagcatgtggtaattttccagcccgctggccctgtaaaggaaactggaacacaaagcatagactgcggggcgggccagcctgaatagctgcaaacaagtgcagaatatctgatgatgtcatacgcacagtttgacagatggggctgg

SEQ ID NO: 155 - DNA, 145 bp, Artificial Sequence
  Synthetic
agtccccagggagctcaagcctgattccaaggagattgccaatattttaggagggagtaaacattttctgaagttttttgttgtctaaagccaaaaaatgcacttgcgcctcctgagaggacaaagaggaagagagacggggaga

SEQ ID NO: 156 - DNA, 162 bp, Artificial Sequence
  Synthetic
atggctgcaaatccaagggtgcacactggggtgtccttggcctgagtgccagcctgcagagagcaggagtgggccacttggggaccccatcccaccaggaagcctgagaaagcccagggtgagcccggccctgtggaattctggagagcccgagaagcattt

SEQ ID NO: 157 - DNA, 178 bp, Artificial Sequence
  Synthetic
gaggttgaaactcctcgccacagtccactctccatctccatccctaccccatcaataagcccttcccccaccatctcaagacactggaatgcaggtagggagaggcccccagagggagtatttgagaatttgctcccctgtcccttgcctcaactactctcagttgcatcttaattcc

SEQ ID NO: 158 - DNA, 153 bp, Artificial Sequence
  Synthetic
ggctgtccctggttgtctggtacctggctttggagcaatgagggctggtggggagcggccccccagtggggccgtctgattagcgcagggctgccgtgtggaccaatcagctgctcaggaaggggccggcccctaaccaggcctcagtgctcg

SEQ ID NO: 159 - DNA, 277 bp, Artificial Sequence
  Synthetic
cagctcagcctgagtgttgaggccccagtggctgctctgggggcctcctgagtttctcatctgtgcccctccctccctggcccaggtgaaggtgtggttccagaaccggaggacaaagtacaaacggcagaagctggaggaggaagggcctgagtccgagcagaagaagaagggctcccatcacatcaaccggtggcgcattgccacgaagcaggccaatggggaggacatcgatgtcacctccaatgactagggtgggcaaccacaaacccacgag

SEQ ID NO: 160 - DNA, 303 bp, Artificial Sequence
  Synthetic
gtggggagatttgcatctgtggaggcaataaagtgaaataaataacagatgcaagcaagcttttcctgacgccccgcttgtccatgtctaggaaagattaacagagagtctgacaccttttaagatctgacagagaaacatttaccatagactatcacctattttttctgagggctgctacctgtacatctgcacaagattgcctttactccatgcctttcttcttctgctctaactctgacaatctgtcttgccatgccataagcccctattctttctgtaaccccaagatggtataaaagc

SEQ ID NO: 161 - DNA, 280 bp, Artificial Sequence
  Synthetic
caatgtgcttcaacccatcacggcctttgcaaatagagccctttattcatagtagacaagagtctaagcagaagaagaagagagccactacccaaccatctactcttctaatggtgttttcctacaaaggccaagtcatgagactgcatccttgtgaaagccaacactgatgataatgaggcttaccttgagtacaatgaagtagaggaaggtaggcagtgaaacagtagaaaaaagtccccccccaaaaaggcagactgcatccatcacaaattcatgg

SEQ ID NO: 162 - DNA, 283 bp, Artificial Sequence
  Synthetic
gagaaggaggtgcaggagctagactccgaggggaggctgcgagccgcaagcgcaggagccgggtgggagagagaccccttcttctgcaaatgaggaggccgagcagaagaaagacggcgacagatgttggggggaggggacggtttgtgagggatagggagagaaagtctaagtgagagcaggacgaggaggggagggtggttggggaaggggatgaaataaagtggctgagggaaggctgaggtggggtgaagctccgccaggagggatgaaggtcgggatg

SEQ ID NO: 163 - DNA, 188 bp, Artificial Sequence
  Synthetic
gctcatttcctacggcccagggagcggccactgcagcggcggcggggaggggaaggggtgaaggggagggggaagtcaccgacaacaacaagccgagtcccccccacacacacactcactcactcactcactcgctctctcactcacacacacacacaacacgggcaagaaccacctcctcactgcag

SEQ ID NO: 164 - DNA, 146 bp, Artificial Sequence
  Synthetic
gccacaggcactaacttcttcagcctatctcctatctgctcttccctcccaccccctccacacacacacacttactcacacgctcacaaacacatgcccaacctaattcagggactcacatacagcttaggaaaggcagcttcatc

SEQ ID NO: 165 - DNA, 196 bp, Artificial Sequence
  Synthetic
gcgctttccctttgctagaatctaattttatgaaacacactcatgtgtgtgcccacatgcacacacacactcaccaagagacacacatataccaaagcaaccactgaaccctctcaagaagaaaaattgaaggctggaattttctctatataatgaagtttttttaaatgttgccagtaatataagcattgctgag

SEQ ID NO: 166 - DNA, 291 bp, Artificial Sequence
  Synthetic
ctgacaaaagaagtcctggtatcttctatggtgggagaagaaaactagctaaagggaagaataaattagagaaaaattggaatgactgaatcggaacaaggcaaaggctataaaaaaaattaagcagcagtatcctcttgggggccccttccccacactatctcaatgcaaatatctgtctgaaacggtccctggctaaactccacccatgggttggccagccttgccttgaccaatagccttgacaaggcaaacttgaccaatagtcttagagtatccagtgaggccagg

SEQ ID NO: 167 - DNA, 291 bp, Artificial Sequence; identical to SEQ ID NO: 166
  Synthetic

SEQ ID NO: 168 - DNA, 143 bp, Artificial Sequence
  Synthetic
tcttagacataacacaccagggtcaatacaactttgaagctagtctagtgcaagctaacagttgcttttatcacaggctccaggaagggtttggcctctgattagggtgggggcgtgggtggggtagaagaggactggcagac

SEQ ID NO: 169 - protein, 1605 aa, Artificial Sequence
  Synthetic
MKRTADGSEFESPKKKRKVSEVEFSHEYWMRHALTLAKRARDEREVPVGAVLVLNNRVIGEGWNRAIGLHDPTAHAEIMALRQGGLVMQNYRLIDATLYVTFEPCVMCAGAMIHSRIGRVVFGVRNSKRGAAGSLMNVLNYPGMNHRVEITEGILADECAALLCDFYRMPRQVFNAQKKAQSSINSGGSSGGSSGSETPGTSESATPESSGGSSGGSDKKYSIGLAIGTNSVGWAVITDEYKVPSKKFKVLGNTDRHSIKKNLIGALLFDSGETAEATRLKRTARRRYTRRKNRICYLQEIFSNEMAKVDDSFFHRLEESFLVEEDKKHERHPIFGNIVDEVAYHEKYPTIYHLRKKLVDSTDKADLRLIYLALAHMIKFRGHFLIEGDLNPDNSDVDKLFIQLVQTYNQLFEENPINASGVDAKAILSARLSKSRRLENLIAQLPGEKKNGLFGNLIALSLGLTPNFKSNFDLAEDAKLQLSKDTYDDDLDNLLAQIGDQYADLFLAAKNLSDAILLSDILRVNTEITKAPLSASMIKRYDEHHQDLTLLKALVRQQLPEKYKEIFFDQSKNGYAGYIDGGASQEEFYKFIKPILEKMDGTEELLVKLNREDLLRKQRTFDNGSIPHQIHLGELHAILRRQEDFYPFLKDNREKIEKILTFRIPYYVGPLARGNSRFAWMTRKSEETITPWNFEEVVDKGASAQSFIERMTNFDKNLPNEKVLPKHSLLYEYFTVYNELTKVKYVTEGMRKPAFLSGEQKKAIVDLLFKTNRKVTVKQLKEDYFKKIECFDSVEISGVEDRFNASLGTYHDLLKIIKDKDFLDNEENEDILEDIVLTLTLFEDREMIEERLKTYAHLFDDKVMKQLKRRRYTGWGRLSRKLINGIRDKQSGKTILDFLKSDGFANRNFMQLIHDDSLTFKEDIQKAQVSGQGDSLHEHIANLAGSPAIKKGILQTVKVVDELVKVMGRHKPENIVIEMARENQTTQKGQKNSRERMKRIEEGIKELGSQILKEHPVENTQLQNEKLYLYYLQNGRDMYVDQELDINRLSDYDVDHIVPQSFLKDDSIDNKVLTRSDKNRGKSDNVPSEEVVKKMKNYWRQLLNAKLITQRKFDNLTKAERGGLSELDKAGFIKRQLVETRQITKHVAQILDSRMNTKYDENDKLIREVKVITLKSKLVSDFRKDFQFYKVREINNYHHAHDAYLNAVVGTALIKKYPKLESEFVYGDYKVYDVRKMIAKSEQEIGKATAKYFFYSNIMNFFKTEITLANGEIRKRPLIETNGETGEIVWDKGRDFATVRKVLSMPQVNIVKKTEVQTGGFSKESILPKRNSDKLIARKKDWDPKKYGGFDSPTVAYSVLVVAKVEKGKSKKLKSVKELLGITIMERSSFEKNPIDFLEAKGYKEVKKDLIIKLPKYSLFELENGRKRMLASAGELQKGNELALPSKYVNFLYLASHYEKLKGSPEDNEQKQLFVEQHKHYLDEIIEQISEFSKRVILADANLDKVLSAYNKHRDKPIREQAENIIHLFTLTNLGAPAAFKYFDTTIDRKRYTSTKEVLDATLIHQSITGLYETRIDLSQLGGDSGGSKRTADGSEFEPKKKRKV

SEQ ID NO: 170 - protein, 1803 aa, Artificial Sequence
  Synthetic
MKRTADGSEFESPKKKRKVSEVEFSHEYWMRHALTLAKRAWDEREVPVGAVLVHNNRVIGEGWNRPIGRHDPTAHAEIMALRQGGLVMQNYRLIDATLYVTLEPCVMCAGAMIHSRIGRVVFGARDAKTGAAGSLMDVLHHPGMNHRVEITEGILADECAALLSDFFRMRRQEIKAQKKAQSSTDSGGSSGGSSGSETPGTSESATPESSGGSSGGSSEVEFSHEYWMRHALTLAKRARDEREVPVGAVLVLNNRVIGEGWNRAIGLHDPTAHAEIMALRQGGLVMQNYRLIDATLYVTFEPCVMCAGAMIHSRIGRVVFGVRNSKRGAAGSLMNVLNYPGMNHRVEITEGILADECAALLCDFYRMPRQVFNAQKKAQSSINSGGSSGGSSGSETPGTSESATPESSGGSSGGSDKKYSIGLAIGTNSVGWAVITDEYKVPSKKFKVLGNTDRHSIKKNLIGALLFDSGETAEATRLKRTARRRYTRRKNRICYLQEIFSNEMAKVDDSFFHRLEESFLVEEDKKHERHPIFGNIVDEVAYHEKYPTIYHLRKKLVDSTDKADLRLIYLALAHMIKFRGHFLIEGDLNPDNSDVDKLFIQLVQTYNQLFEENPINASGVDAKAILSARLSKSRRLENLIAQLPGEKKNGLFGNLIALSLGLTPNFKSNFDLAEDAKLQLSKDTYDDDLDNLLAQIGDQYADLFLAAKNLSDAILLSDILRVNTEITKAPLSASMIKRYDEHHQDLTLLKALVRQQLPEKYKEIFFDQSKNGYAGYIDGGASQEEFYKFIKPILEKMDGTEELLVKLNREDLLRKQRTFDNGSIPHQIHLGELHAILRRQEDFYPFLKDNREKIEKILTFRIPYYVGPLARGNSRFAWMTRKSEETITPWNFEEVVDKGASAQSFIERMTNFDKNLPNEKVLPKHSLLYEYFTVYNELTKVKYVTEGMRKPAFLSGEQKKAIVDLLFKTNRKVTVKQLKEDYFKKIECFDSVEISGVEDRFNASLGTYHDLLKIIKDKDFLDNEENEDILEDIVLTLTLFEDREMIEERLKTYAHLFDDKVMKQLKRRRYTGWGRLSRKLINGIRDKQSGKTILDFLKSDGFANRNFMQLIHDDSLTFKEDIQKAQVSGQGDSLHEHIANLAGSPAIKKGILQTVKVVDELVKVMGRHKPENIVIEMARENQTTQKGQKNSRERMKRIEEGIKELGSQILKEHPVENTQLQNEKLYLYYLQNGRDMYVDQELDINRLSDYDVDHIVPQSFLKDDSIDNKVLTRSDKNRGKSDNVPSEEVVKKMKNYWRQLLNAKLITQRKFDNLTKAERGGLSELDKAGFIKRQLVETRQITKHVAQILDSRMNTKYDENDKLIREVKVITLKSKLVSDFRKDFQFYKVREINNYHHAHDAYLNAVVGTALIKKYPKLESEFVYGDYKVYDVRKMIAKSEQEIGKATAKYFFYSNIMNFFKTEITLANGEIRKRPLIETNGETGEIVWDKGRDFATVRKVLSMPQVNIVKKTEVQTGGFSKESILPKRNSDKLIARKKDWDPKKYGGFDSPTVAYSVLVVAKVEKGKSKKLKSVKELLGITIMERSSFEKNPIDFLEAKGYKEVKKDLIIKLPKYSLFELENGRKRMLASAGELQKGNELALPSKYVNFLYLASHYEKLKGSPEDNEQKQLFVEQHKHYLDEIIEQISEFSKRVILADANLDKVLSAYNKHRDKPIREQAENIIHLFTLTNLGAPAAFKYFDTTIDRKRYTSTKEVLDATLIHQSITGLYETRIDLSQLGGDSGGSKRTADGSEFEPKKKRKV

SEQ ID NO: 171 - protein, 1291 aa, Artificial Sequence
  Synthetic
MKRTADGSEFESPKKKRKVSEVEFSHEYWMRHALTLAKRARDEREVPVGAVLVLNNRVIGEGWNRAIGLHDPTAHAEIMALRQGGLVMQNYRLIDATLYVTFEPCVMCAGAMIHSRIGRVVFGVRNSKRGAAGSLMNVLNYPGMNHRVEITEGILADECAALLCDFYRMPRQVFNAQKKAQSSINSGGSSGGSSGSETPGTSESATPESSGGSSGGSGKRNYILGLAIGITSVGYGIIDYETRDVIDAGVRLFKEANVENNEGRRSKRGARRLKRRRRHRIQRVKKLLFDYNLLTDHSELSGINPYEARVKGLSQKLSEEEFSAALLHLAKRRGVHNVNEVEEDTGNELSTKEQISRNSKALEEKYVAELQLERLKKDGEVRGSINRFKTSDYVKEAKQLLKVQKAYHQLDQSFIDTYIDLLETRRTYYEGPGEGSPFGWKDIKEWYEMLMGHCTYFPEELRSVKYAYNADLYNALNDLNNLVITRDENEKLEYYEKFQIIENVFKQKKKPTLKQIAKEILVNEEDIKGYRVTSTGKPEFTNLKVYHDIKDITARKEIIENAELLDQIAKILTIYQSSEDIQEELTNLNSELTQEEIEQISNLKGYTGTHNLSLKAINLILDELWHTNDNQIAIFNRLKLVPKKVDLSQQKEIPTTLVDDFILSPVVKRSFIQSIKVINAIIKKYGLPNDIIIELAREKNSKDAQKMINEMQKRNRQTNERIEEIIRTTGKENAKYLIEKIKLHDMQEGKCLYSLEAIPLEDLLNNPFNYEVDHIIPRSVSFDNSFNNKVLVKQEENSKKGNRTPFQYLSSSDSKISYETFKKHILNLAKGKGRISKTKKEYLLEERDINRFSVQKDFINRNLVDTRYATRGLMNLLRSYFRVNNLDVKVKSINGGFTSFLRRKWKFKKERNKGYKHHAEDALIIANADFIFKEWKKLDKAKKVMENQMFEEKQAESMPEIETEQEYKEIFITPHQIKHIKDFKDYKYSHRVDKKPNRELINDTLYSTRKDDKGNTLIVNNLNGLYDKDNDKLKKLINKSPEKLLMYHHDPQTYQKLKLIMEQYGDEKNPLYKYYEETGNYLTKYSKKDNGPVIKKIKYYGNKLNAHLDITDDYPNSRNKVVKLSLKPYRFDVYLDNGVYKFVTVKNLDVIKKENYYEVNSKCYEEAKKLKKISNQAEFIASFYNNDLIKINGELYRVIGVNNDLLNRIEVNMIDITYREYLENMNDKRPPRIIKTIASKTQSIKKYSTDILGNLYEVKSKKHPQIIKKGSGGSKRTADGSEFEPKKKRKV

SEQ ID NO: 172 - protein, 1489 aa, Artificial Sequence
  Synthetic
MKRTADGSEFESPKKKRKVSEVEFSHEYWMRHALTLAKRAWDEREVPVGAVLVHNNRVIGEGWNRPIGRHDPTAHAEIMALRQGGLVMQNYRLIDATLYVTLEPCVMCAGAMIHSRIGRVVFGARDAKTGAAGSLMDVLHHPGMNHRVEITEGILADECAALLSDFFRMRRQEIKAQKKAQSSTDSGGSSGGSSGSETPGTSESATPESSGGSSGGSSEVEFSHEYWMRHALTLAKRARDEREVPVGAVLVLNNRVIGEGWNRAIGLHDPTAHAEIMALRQGGLVMQNYRLIDATLYVTFEPCVMCAGAMIHSRIGRVVFGVRNSKRGAAGSLMNVLNYPGMNHRVEITEGILADECAALLCDFYRMPRQVFNAQKKAQSSINSGGSSGGSSGSETPGTSESATPESSGGSSGGSGKRNYILGLAIGITSVGYGIIDYETRDVIDAGVRLFKEANVENNEGRRSKRGARRLKRRRRHRIQRVKKLLFDYNLLTDHSELSGINPYEARVKGLSQKLSEEEFSAALLHLAKRRGVHNVNEVEEDTGNELSTKEQISRNSKALEEKYVAELQLERLKKDGEVRGSINRFKTSDYVKEAKQLLKVQKAYHQLDQSFIDTYIDLLETRRTYYEGPGEGSPFGWKDIKEWYEMLMGHCTYFPEELRSVKYAYNADLYNALNDLNNLVITRDENEKLEYYEKFQIIENVFKQKKKPTLKQIAKEILVNEEDIKGYRVTSTGKPEFTNLKVYHDIKDITARKEIIENAELLDQIAKILTIYQSSEDIQEELTNLNSELTQEEIEQISNLKGYTGTHNLSLKAINLILDELWHTNDNQIAIFNRLKLVPKKVDLSQQKEIPTTLVDDFILSPVVKRSFIQSIKVINAIIKKYGLPNDIIIELAREKNSKDAQKMINEMQKRNRQTNERIEEIIRTTGKENAKYLIEKIKLHDMQEGKCLYSLEAIPLEDLLNNPFNYEVDHIIPRSVSFDNSFNNKVLVKQEENSKKGNRTPFQYLSSSDSKISYETFKKHILNLAKGKGRISKTKKEYLLEERDINRFSVQKDFINRNLVDTRYATRGLMNLLRSYFRVNNLDVKVKSINGGFTSFLRRKWKFKKERNKGYKHHAEDALIIANADFIFKEWKKLDKAKKVMENQMFEEKQAESMPEIETEQEYKEIFITPHQIKHIKDFKDYKYSHRVDKKPNRELINDTLYSTRKDDKGNTLIVNNLNGLYDKDNDKLKKLINKSPEKLLMYHHDPQTYQKLKLIMEQYGDEKNPLYKYYEETGNYLTKYSKKDNGPVIKKIKYYGNKLNAHLDITDDYPNSRNKVVKLSLKPYRFDVYLDNGVYKFVTVKNLDVIKKENYYEVNSKCYEEAKKLKKISNQAEFIASFYNNDLIKINGELYRVIGVNNDLLNRIEVNMIDITYREYLENMNDKRPPRIIKTIASKTQSIKKYSTDILGNLYEVKSKKHPQIIKKGSGGSKRTADGSEFEPKKKRKV

SEQ ID NO: 173 - protein, 1464 aa, Artificial Sequence
  Synthetic
MKRTADGSEFESPKKKRKVSEVEFSHEYWMRHALTLAKRARDEREVPVGAVLVLNNRVIGEGWNRAIGLHDPTAHAEIMALRQGGLVMQNYRLIDATLYVTFEPCVMCAGAMIHSRIGRVVFGVRNSKRGAAGSLMNVLNYPGMNHRVEITEGILADECAALLCDFYRMPRQVFNAQKKAQSSINSGGSSGGSSGSETPGTSESATPESSGGSSGGSSKLEKFTNCYSLSKTLRFKAIPVGKTQENIDNKRLLVEDEKRAEDYKGVKKLLDRYYLSFINDVLHSIKLKNLNNYISLFRKKTRTEKENKELENLEINLRKEIAKAFKGNEGYKSLFKKDIIETILPEFLDDKDEIALVNSFNGFTTAFTGFFDNRENMFSEEAKSTSIAFRCINENLTRYISNMDIFEKVDAIFDKHEVQEIKEKILNSDYDVEDFFEGEFFNFVLTQEGIDVYNAIIGGFVTESGEKIKGLNEYINLYNQKTKQKLPKFKPLYKQVLSDRESLSFYGEGYTSDEEVLEVFRNTLNKNSEIFSSIKKLEKLFKNFDEYSSAGIFVKNGPAISTISKDIFGEWNVIRDKWNAEYDDIHLKKKAVVTEKYEDDRRKSFKKIGSFSLEQLQEYADADLSVVEKLKEIIIQKVDEIYKVYGSSEKLFDADFVLEKSLKKNDAVVAIMKDLLDSVKSFENYIKAFFGEGKETNRDESFYGDFVLAYDILLKVDHIYDAIRNYVTQKPYSKDKFKLYFQNPQFMGGWDKDKETDYRATILRYGSKYYLAIMDKKYAKCLQKIDKDDVNGNYEKINYKLLPGPNKMLPKVFFSKKWMAYYNPSEDIQKIYKNGTFKKGDMFNLNDCHKLIDFFKDSISRYPKWSNAYDFNFSETEKYKDIAGFYREVEEQGYKVSFESASKKEVDKLVEEGKLYMFQIYNKDFSDKSHGTPNLHTMYFKLLFDENNHGQIRLSGGAELFMRRASLKKEELVVHPANSPIANKNPDNPKKTTTLSYDVYKDKRFSEDQYELHIPIAINKCPKNIFKINTEVRVLLKHDDNPYVIGIARGERNLLYIVVVDGKGNIVEQYSLNEIINNFNGIRIKTDYHSLLDKKEKERFEARQNWTSIENIKELKAGYISQVVHKICELVEKYDAVIALEDLNSGFKNSRVKVEKQVYQKFEKMLIDKLNYMVDKKSNPCATGGALKGYQITNKFESFKSMSTQNGFIFYIPAWLTSKIDPSTGFVNLLKTKYTSIADSKKFISSFDRIMYVPEEDLFEFALDYKNFSRTDADYIKKWKLYSYGNRIRIFRNPKKNNVFDWEEVCLTSAYKELFNKYGINYQQGDIRALLCEQSDKAFYSSFMALMSLMLQMRNSITGRTDVDFLISPVKNSDGIFYDSRNYEAQENAILPKNADANGAYNIARKVLWAIGQFKKAEDEKLDKVKIAISNKEWLEYAQTSVKSGGSKRTADGSEFEPKKKRKV

SEQ ID NO: 174 - protein, 1662 aa, Artificial Sequence
  Synthetic
MKRTADGSEFESPKKKRKVSEVEFSHEYWMRHALTLAKRAWDEREVPVGAVLVHNNRVIGEGWNRPIGRHDPTAHAEIMALRQGGLVMQNYRLIDATLYVTLEPCVMCAGAMIHSRIGRVVFGARDAKTGAAGSLMDVLHHPGMNHRVEITEGILADECAALLSDFFRMRRQEIKAQKKAQSSTDSGGSSGGSSGSETPGTSESATPESSGGSSGGSSEVEFSHEYWMRHALTLAKRARDEREVPVGAVLVLNNRVIGEGWNRAIGLHDPTAHAEIMALRQGGLVMQNYRLIDATLYVTFEPCVMCAGAMIHSRIGRVVFGVRNSKRGAAGSLMNVLNYPGMNHRVEITEGILADECAALLCDFYRMPRQVFNAQKKAQSSINSGGSSGGSSGSETPGTSESATPESSGGSSGGSSKLEKFTNCYSLSKTLRFKAIPVGKTQENIDNKRLLVEDEKRAEDYKGVKKLLDRYYLSFINDVLHSIKLKNLNNYISLFRKKTRTEKENKELENLEINLRKEIAKAFKGNEGYKSLFKKDIIETILPEFLDDKDEIALVNSFNGFTTAFTGFFDNRENMFSEEAKSTSIAFRCINENLTRYISNMDIFEKVDAIFDKHEVQEIKEKILNSDYDVEDFFEGEFFNFVLTQEGIDVYNAIIGGFVTESGEKIKGLNEYINLYNQKTKQKLPKFKPLYKQVLSDRESLSFYGEGYTSDEEVLEVFRNTLNKNSEIFSSIKKLEKLFKNFDEYSSAGIFVKNGPAISTISKDIFGEWNVIRDKWNAEYDDIHLKKKAVVTEKYEDDRRKSFKKIGSFSLEQLQEYADADLSVVEKLKEIIIQKVDEIYKVYGSSEKLFDADFVLEKSLKKNDAVVAIMKDLLDSVKSFENYIKAFFGEGKETNRDESFYGDFVLAYDILLKVDHIYDAIRNYVTQKPYSKDKFKLYFQNPQFMGGWDKDKETDYRATILRYGSKYYLAIMDKKYAKCLQKIDKDDVNGNYEKINYKLLPGPNKMLPKVFFSKKWMAYYNPSEDIQKIYKNGTFKKGDMFNLNDCHKLIDFFKDSISRYPKWSNAYDFNFSETEKYKDIAGFYREVEEQGYKVSFESASKKEVDKLVEEGKLYMFQIYNKDFSDKSHGTPNLHTMYFKLLFDENNHGQIRLSGGAELFMRRASLKKEELVVHPANSPIANKNPDNPKKTTTLSYDVYKDKRFSEDQYELHIPIAINKCPKNIFKINTEVRVLLKHDDNPYVIGIARGERNLLYIVVVDGKGNIVEQYSLNEIINNFNGIRIKTDYHSLLDKKEKERFEARQNWTSIENIKELKAGYISQVVHKICELVEKYDAVIALEDLNSGFKNSRVKVEKQVYQKFEKMLIDKLNYMVDKKSNPCATGGALKGYQITNKFESFKSMSTQNGFIFYIPAWLTSKIDPSTGFVNLLKTKYTSIADSKKFISSFDRIMYVPEEDLFEFALDYKNFSRTDADYIKKWKLYSYGNRIRIFRNPKKNNVFDWEEVCLTSAYKELFNKYGINYQQGDIRALLCEQSDKAFYSSFMALMSLMLQMRNSITGRTDVDFLISPVKNSDGIFYDSRNYEAQENAILPKNADANGAYNIARKVLWAIGQFKKAEDEKLDKVKIAISNKEWLEYAQTSVKSGGSKRTADGSEFEPKKKRKV

SEQ ID NO: 175 - protein, 1662 aa, Artificial Sequence
  Synthetic
MKRTADGSEFESPKKKRKVSEVEFSHEYWMRHALTLAKRAWDEREVPVGAVLVHNNRVIGEGWNRPIGRHDPTAHAEIMALRQGGLVMQNYRLIDATLYVTLEPCVMCAGAMIHSRIGRVVFGARDAKTGAAGSLMDVLHHPGMNHRVEITEGILADECAALLSDFFRMRRQEIKAQKKAQSSTDSGGSSGGSSGSETPGTSESATPESSGGSSGGSSEVEFSHEYWMRHALTLAKRARDEREVPVGAVLVLNNRVIGEGWNRAIGLHDPTAHAEIMALRQGGLVMQNYRLIDATLYVTFEPCVMCAGAMIHSRIGRVVFGVRNAKTGAAGSLMDVLHYPGMNHRVEITEGILADECAALLCYFFRMPRQVFNAQKKAQSSTDSGGSSGGSSGSETPGTSESATPESSGGSSGGSSKLEKFTNCYSLSKTLRFKAIPVGKTQENIDNKRLLVEDEKRAEDYKGVKKLLDRYYLSFINDVLHSIKLKNLNNYISLFRKKTRTEKENKELENLEINLRKEIAKAFKGNEGYKSLFKKDIIETILPEFLDDKDEIALVNSFNGFTTAFTGFFDNRENMFSEEAKSTSIAFRCINENLTRYISNMDIFEKVDAIFDKHEVQEIKEKILNSDYDVEDFFEGEFFNFVLTQEGIDVYNAIIGGFVTESGEKIKGLNEYINLYNQKTKQKLPKFKPLYKQVLSDRESLSFYGEGYTSDEEVLEVFRNTLNKNSEIFSSIKKLEKLFKNFDEYSSAGIFVKNGPAISTISKDIFGEWNVIRDKWNAEYDDIHLKKKAVVTEKYEDDRRKSFKKIGSFSLEQLQEYADADLSVVEKLKEIIIQKVDEIYKVYGSSEKLFDADFVLEKSLKKNDAVVAIMKDLLDSVKSFENYIKAFFGEGKETNRDESFYGDFVLAYDILLKVDHIYDAIRNYVTQKPYSKDKFKLYFQNPQFMGGWDKDKETDYRATILRYGSKYYLAIMDKKYAKCLQKIDKDDVNGNYEKINYKLLPGPNKMLPKVFFSKKWMAYYNPSEDIQKIYKNGTFKKGDMFNLNDCHKLIDFFKDSISRYPKWSNAYDFNFSETEKYKDIAGFYREVEEQGYKVSFESASKKEVDKLVEEGKLYMFQIYNKDFSDKSHGTPNLHTMYFKLLFDENNHGQIRLSGGAELFMRRASLKKEELVVHPANSPIANKNPDNPKKTTTLSYDVYKDKRFSEDQYELHIPIAINKCPKNIFKINTEVRVLLKHDDNPYVIGIARGERNLLYIVVVDGKGNIVEQYSLNEIINNFNGIRIKTDYHSLLDKKEKERFEARQNWTSIENIKELKAGYISQVVHKICELVEKYDAVIALEDLNSGFKNSRVKVEKQVYQKFEKMLIDKLNYMVDKKSNPCATGGALKGYQITNKFESFKSMSTQNGFIFYIPAWLTSKIDPSTGFVNLLKTKYTSIADSKKFISSFDRIMYVPEEDLFEFALDYKNFSRTDADYIKKWKLYSYGNRIRIFRNPKKNNVFDWEEVCLTSAYKELFNKYGINYQQGDIRALLCEQSDKAFYSSFMALMSLMLQMRNSITGRTDVDFLISPVKNSDGIFYDSRNYEAQENAILPKNADANGAYNIARKVLWAIGQFKKAEDEKLDKVKIAISNKEWLEYAQTSVKSGGSKRTADGSEFEPKKKRKV

SEQ ID NO: 176 - protein, 1545 aa, Artificial Sequence
  Synthetic
MKRTADGSEFESPKKKRKVSEVEFSHEYWMRHALTLAKRARDEREVPVGAVLVLNNRVIGEGWNRAIGLHDPTAHAEIMALRQGGLVMQNYRLIDATLYVTFEPCVMCAGAMIHSRIGRVVFGVRNSKRGAAGSLMNVLNYPGMNHRVEITEGILADECAALLCDFYRMPRQVFNAQKKAQSSINSGGSSGGSSGSETPGTSESATPESSGGSSGGSMTQFEGFTNLYQVSKTLRFELIPQGKTLKHIQEQGFIEEDKARNDHYKELKPIIDRIYKTYADQCLQLVQLDWENLSAAIDSYRKEKTEETRNALIEEQATYRNAIHDYFIGRTDNLTDAINKRHAEIYKGLFKAELFNGKVLKQLGTVTTTEHENALLRSFDKFTTYFSGFYRNRKNVFSAEDISTAIPHRIVQDNFPKFKENCHIFTRLITAVPSLREHFENVKKAIGIFVSTSIEEVFSFPFYNQLLTQTQIDLYNQLLGGISREAGTEKIKGLNEVLNLAIQKNDETAHIIASLPHRFIPLFKQILSDRNTLSFILEEFKSDEEVIQSFCKYKTLLRNENVLETAEALFNELNSIDLTHIFISHKKLETISSALCDHWDTLRNALYERRISELTGKITKSAKEKVQRSLKHEDINLQEIISAAGKELSEAFKQKTSEILSHAHAALDQPLPTTLKKQEEKEILKSQLDSLLGLYHLLDWFAVDESNEVDPEFSARLTGIKLEMEPSLSFYNKARNYATKKPYSVEKFKLNFQMPTLARGWDVNREKNNGAILFVKNGLYYLGIMPKQKGRYKALSFEPTEKTSEGFDKMYYDYFPDAAKMIPKCSTQLKAVTAHFQTHTTPILLSNNFIEPLEITKEIYDLNNPEKEPKKFQTAYAKKTGDQKGYREALCKWIDFTRDFLSKYTKTTSIDLSSLRPSSQYKDLGEYYAELNPLLYHISFQRIAEKEIMDAVETGKLYLFQIYNKDFAKGHHGKPNLHTLYWTGLFSPENLAKTSIKLNGQAELFYRPKSRMKRMAHRLGEKMLNKKLKDQKTPIPDTLYQELYDYVNHRLSHDLSDEARALLPNVITKEVSHEIIKDRRFTSDKFFFHVPITLNYQAANSPSKFNQRVNAYLKEHPETPIIGIARGERNLIYITVIDSTGKILEQRSLNTIQQFDYQKKLDNREKERVAARQAWSVVGTIKDLKQGYLSQVIHEIVDLMIHYQAVVVLENLNFGFKSKRTGIAEKAVYQQFEKMLIDKLNCLVLKDYPAEKVGGVLNPYQLTDQFTSFAKMGTQSGFLFYVPAPYTSKIDPLTGFVDPFVWKTIKNHESRKHFLEGFDFLHYDVKTGDFILHFKMNRNLSFQRGLPGFMPAWDIVFEKNETQFDAKGTPFIAGKRIVPVIENHRFTGRYRDLYPANELIALLEEKGIVFRDGSNILPKLLENDDSHAIDTMVALIRSVLQMRNSNAATGEDYINSPVRDLNGVCFDSRFQNPEWPMDADANGAYHIALKGQLLLNHLKESKDLKLQNGISNQDWLAYIQELRNSGGSKRTADGSEFEPKKKRKV

SEQ ID NO: 177 - protein, 1743 aa, Artificial Sequence
  Synthetic
MKRTADGSEFESPKKKRKVSEVEFSHEYWMRHALTLAKRAWDEREVPVGAVLVHNNRVIGEGWNRPIGRHDPTAHAEIMALRQGGLVMQNYRLIDATLYVTLEPCVMCAGAMIHSRIGRVVFGARDAKTGAAGSLMDVLHHPGMNHRVEITEGILADECAALLSDFFRMRRQEIKAQKKAQSSTDSGGSSGGSSGSETPGTSESATPESSGGSSGGSSEVEFSHEYWMRHALTLAKRARDEREVPVGAVLVLNNRVIGEGWNRAIGLHDPTAHAEIMALRQGGLVMQNYRLIDATLYVTFEPCVMCAGAMIHSRIGRVVFGVRNSKRGAAGSLMNVLNYPGMNHRVEITEGILADECAALLCDFYRMPRQVFNAQKKAQSSINSGGSSGGSSGSETPGTSESATPESSGGSSGGSMTQFEGFTNLYQVSKTLRFELIPQGKTLKHIQEQGFIEEDKARNDHYKELKPIIDRIYKTYADQCLQLVQLDWENLSAAIDSYRKEKTEETRNALIEEQATYRNAIHDYFIGRTDNLTDAINKRHAEIYKGLFKAELFNGKVLKQLGTVTTTEHENALLRSFDKFTTYFSGFYRNRKNVFSAEDISTAIPHRIVQDNFPKFKENCHIFTRLITAVPSLREHFENVKKAIGIFVSTSIEEVFSFPFYNQLLTQTQIDLYNQLLGGISREAGTEKIKGLNEVLNLAIQKNDETAHIIASLPHRFIPLFKQILSDRNTLSFILEEFKSDEEVIQSFCKYKTLLRNENVLETAEALFNELNSIDLTHIFISHKKLETISSALCDHWDTLRNALYERRISELTGKITKSAKEKVQRSLKHEDINLQEIISAAGKELSEAFKQKTSEILSHAHAALDQPLPTTLKKQEEKEILKSQLDSLLGLYHLLDWFAVDESNEVDPEFSARLTGIKLEMEPSLSFYNKARNYATKKPYSVEKFKLNFQMPTLARGWDVNREKNNGAILFVKNGLYYLGIMPKQKGRYKALSFEPTEKTSEGFDKMYYDYFPDAAKMIPKCSTQLKAVTAHFQTHTTPILLSNNFIEPLEITKEIYDLNNPEKEPKKFQTAYAKKTGDQKGYREALCKWIDFTRDFLSKYTKTTSIDLSSLRPSSQYKDLGEYYAELNPLLYHISFQRIAEKEIMDAVETGKLYLFQIYNKDFAKGHHGKPNLHTLYWTGLFSPENLAKTSIKLNGQAELFYRPKSRMKRMAHRLGEKMLNKKLKDQKTPIPDTLYQELYDYVNHRLSHDLSDEARALLPNVITKEVSHEIIKDRRFTSDKFFFHVPITLNYQAANSPSKFNQRVNAYLKEHPETPIIGIARGERNLIYITVIDSTGKILEQRSLNTIQQFDYQKKLDNREKERVAARQAWSVVGTIKDLKQGYLSQVIHEIVDLMIHYQAVVVLENLNFGFKSKRTGIAEKAVYQQFEKMLIDKLNCLVLKDYPAEKVGGVLNPYQLTDQFTSFAKMGTQSGFLFYVPAPYTSKIDPLTGFVDPFVWKTIKNHESRKHFLEGFDFLHYDVKTGDFILHFKMNRNLSFQRGLPGFMPAWDIVFEKNETQFDAKGTPFIAGKRIVPVIENHRFTGRYRDLYPANELIALLEEKGIVFRDGSNILPKLLENDDSHAIDTMVALIRSVLQMRNSNAATGEDYINSPVRDLNGVCFDSRFQNPEWPMDADANGAYHIALKGQLLLNHLKESKDLKLQNGISNQDWLAYIQELRNSGGSKRTADGSEFEPKKKRKV

SEQ ID NO: 178 - protein, 1743 aa, Artificial Sequence
  Synthetic
MKRTADGSEFESPKKKRKVSEVEFSHEYWMRHALTLAKRAWDEREVPVGAVLVHNNRVIGEGWNRPIGRHDPTAHAEIMALRQGGLVMQNYRLIDATLYVTLEPCVMCAGAMIHSRIGRVVFGARDAKTGAAGSLMDVLHHPGMNHRVEITEGILADECAALLSDFFRMRRQEIKAQKKAQSSTDSGGSSGGSSGSETPGTSESATPESSGGSSGGSSEVEFSHEYWMRHALTLAKRARDEREVPVGAVLVLNNRVIGEGWNRAIGLHDPTAHAEIMALRQGGLVMQNYRLIDATLYVTFEPCVMCAGAMIHSRIGRVVFGVRNAKTGAAGSLMDVLHYPGMNHRVEITEGILADECAALLCYFFRMPRQVFNAQKKAQSSTDSGGSSGGSSGSETPGTSESATPESSGGSSGGSMTQFEGFTNLYQVSKTLRFELIPQGKTLKHIQEQGFIEEDKARNDHYKELKPIIDRIYKTYADQCLQLVQLDWENLSAAIDSYRKEKTEETRNALIEEQATYRNAIHDYFIGRTDNLTDAINKRHAEIYKGLFKAELFNGKVLKQLGTVTTTEHENALLRSFDKFTTYFSGFYRNRKNVFSAEDISTAIPHRIVQDNFPKFKENCHIFTRLITAVPSLREHFENVKKAIGIFVSTSIEEVFSFPFYNQLLTQTQIDLYNQLLGGISREAGTEKIKGLNEVLNLAIQKNDETAHIIASLPHRFIPLFKQILSDRNTLSFILEEFKSDEEVIQSFCKYKTLLRNENVLETAEALFNELNSIDLTHIFISHKKLETISSALCDHWDTLRNALYERRISELTGKITKSAKEKVQRSLKHEDINLQEIISAAGKELSEAFKQKTSEILSHAHAALDQPLPTTLKKQEEKEILKSQLDSLLGLYHLLDWFAVDESNEVDPEFSARLTGIKLEMEPSLSFYNKARNYATKKPYSVEKFKLNFQMPTLARGWDVNREKNNGAILFVKNGLYYLGIMPKQKGRYKALSFEPTEKTSEGFDKMYYDYFPDAAKMIPKCSTQLKAVTAHFQTHTTPILLSNNFIEPLEITKEIYDLNNPEKEPKKFQTAYAKKTGDQKGYREALCKWIDFTRDFLSKYTKTTSIDLSSLRPSSQYKDLGEYYAELNPLLYHISFQRIAEKEIMDAVETGKLYLFQIYNKDFAKGHHGKPNLHTLYWTGLFSPENLAKTSIKLNGQAELFYRPKSRMKRMAHRLGEKMLNKKLKDQKTPIPDTLYQELYDYVNHRLSHDLSDEARALLPNVITKEVSHEIIKDRRFTSDKFFFHVPITLNYQAANSPSKFNQRVNAYLKEHPETPIIGIARGERNLIYITVIDSTGKILEQRSLNTIQQFDYQKKLDNREKERVAARQAWSVVGTIKDLKQGYLSQVIHEIVDLMIHYQAVVVLENLNFGFKSKRTGIAEKAVYQQFEKMLIDKLNCLVLKDYPAEKVGGVLNPYQLTDQFTSFAKMGTQSGFLFYVPAPYTSKIDPLTGFVDPFVWKTIKNHESRKHFLEGFDFLHYDVKTGDFILHFKMNRNLSFQRGLPGFMPAWDIVFEKNETQFDAKGTPFIAGKRIVPVIENHRFTGRYRDLYPANELIALLEEKGIVFRDGSNILPKLLENDDSHAIDTMVALIRSVLQMRNSNAATGEDYINSPVRDLNGVCFDSRFQNPEWPMDADANGAYHIALKGQLLLNHLKESKDLKLQNGISNQDWLAYIQELRNSGGSKRTADGSEFEPKKKRKV

SEQ ID NO: 179 - protein, 1605 aa, Artificial Sequence
  Synthetic
MKRTADGSEFESPKKKRKVSEVEFSHEYWMRHALTLAKRARDEREVPVGAVLVLNNRVIGEGWNRAIGLHDPTAHAEIMALRQGGLVMQNYRLIDATLYVTFEPCVMCAGAMIHSRIGRVVFGVRNSKRGAAGSLMNVLNYPGMNHRVEITEGILADECAALLCDFYRMPRQVFNAQKKAQSSINSGGSSGGSSGSETPGTSESATPESSGGSSGGSDKKYSIGLAIGTNSVGWAVITDEYKVPSKKFKVLGNTDRHSIKKNLIGALLFDSGETAEATRLKRTARRRYTRRKNRICYLQEIFSNEMAKVDDSFFHRLEESFLVEEDKKHERHPIFGNIVDEVAYHEKYPTIYHLRKKLVDSTDKADLRLIYLALAHMIKFRGHFLIEGDLNPDNSDVDKLFIQLVQTYNQLFEENPINASGVDAKAILSARLSKSRRLENLIAQLPGEKKNGLFGNLIALSLGLTPNFKSNFDLAEDAKLQLSKDTYDDDLDNLLAQIGDQYADLFLAAKNLSDAILLSDILRVNTEITKAPLSASMIKRYDEHHQDLTLLKALVRQQLPEKYKEIFFDQSKNGYAGYIDGGASQEEFYKFIKPILEKMDGTEELLVKLNREDLLRKQRTFDNGSIPHQIHLGELHAILRRQEDFYPFLKDNREKIEKILTFRIPYYVGPLARGNSRFAWMTRKSEETITPWNFEEVVDKGASAQSFIERMTNFDKNLPNEKVLPKHSLLYEYFTVYNELTKVKYVTEGMRKPAFLSGEQKKAIVDLLFKTNRKVTVKQLKEDYFKKIECFDSVEISGVEDRFNASLGTYHDLLKIIKDKDFLDNEENEDILEDIVLTLTLFEDREMIEERLKTYAHLFDDKVMKQLKRRRYTGWGRLSRKLINGIRDKQSGKTILDFLKSDGFANRNFMQLIHDDSLTFKEDIQKAQVSGQGDSLHEHIANLAGSPAIKKGILQTVKVVDELVKVMGRHKPENIVIEMARENQTTQKGQKNSRERMKRIEEGIKELGSQILKEHPVENTQLQNEKLYLYYLQNGRDMYVDQELDINRLSDYDVDHIVPQSFLKDDSIDNKVLTRSDKNRGKSDNVPSEEVVKKMKNYWRQLLNAKLITQRKFDNLTKAERGGLSELDKAGFIKRQLVETRQITKHVAQILDSRMNTKYDENDKLIREVKVITLKSKLVSDFRKDFQFYKVREINNYHHAHDAYLNAVVGTALIKKYPKLESEFVYGDYKVYDVRKMIAKSEQEIGKATAKYFFYSNIMNFFKTEITLANGEIRKRPLIETNGETGEIVWDKGRDFATVRKVLSMPQVNIVKKTEVQTGGFSKESIRPKRNSDKLIARKKDWDPKKYGGFVSPTVAYSVLVVAKVEKGKSKKLKSVKELLGITIMERSSFEKNPIDFLEAKGYKEVKKDLIIKLPKYSLFELENGRKRMLASARFLQKGNELALPSKYVNFLYLASHYEKLKGSPEDNEQKQLFVEQHKHYLDEIIEQISEFSKRVILADANLDKVLSAYNKHRDKPIREQAENIIHLFTLTNLGAPRAFKYFDTTIDRKVYRSTKEVLDATLIHQSITGLYETRIDLSQLGGDSGGSKRTADGSEFEPKKKRKV

SEQ ID NO: 180 - protein, 1803 aa, Artificial Sequence
  Synthetic
MKRTADGSEFESPKKKRKVSEVEFSHEYWMRHALTLAKRAWDEREVPVGAVLVHNNRVIGEGWNRPIGRHDPTAHAEIMALRQGGLVMQNYRLIDATLYVTLEPCVMCAGAMIHSRIGRVVFGARDAKTGAAGSLMDVLHHPGMNHRVEITEGILADECAALLSDFFRMRRQEIKAQKKAQSSTDSGGSSGGSSGSETPGTSESATPESSGGSSGGSSEVEFSHEYWMRHALTLAKRARDEREVPVGAVLVLNNRVIGEGWNRAIGLHDPTAHAEIMALRQGGLVMQNYRLIDATLYVTFEPCVMCAGAMIHSRIGRVVFGVRNSKRGAAGSLMNVLNYPGMNHRVEITEGILADECAALLCDFYRMPRQVFNAQKKAQSSINSGGSSGGSSGSETPGTSESATPESSGGSSGGSDKKYSIGLAIGTNSVGWAVITDEYKVPSKKFKVLGNTDRHSIKKNLIGALLFDSGETAEATRLKRTARRRYTRRKNRICYLQEIFSNEMAKVDDSFFHRLEESFLVEEDKKHERHPIFGNIVDEVAYHEKYPTIYHLRKKLVDSTDKADLRLIYLALAHMIKFRGHFLIEGDLNPDNSDVDKLFIQLVQTYNQLFEENPINASGVDAKAILSARLSKSRRLENLIAQLPGEKKNGLFGNLIALSLGLTPNFKSNFDLAEDAKLQLSKDTYDDDLDNLLAQIGDQYADLFLAAKNLSDAILLSDILRVNTEITKAPLSASMIKRYDEHHQDLTLLKALVRQQLPEKYKEIFFDQSKNGYAGYIDGGASQEEFYKFIKPILEKMDGTEELLVKLNREDLLRKQRTFDNGSIPHQIHLGELHAILRRQEDFYPFLKDNREKIEKILTFRIPYYVGPLARGNSRFAWMTRKSEETITPWNFEEVVDKGASAQSFIERMTNFDKNLPNEKVLPKHSLLYEYFTVYNELTKVKYVTEGMRKPAFLSGEQKKAIVDLLFKTNRKVTVKQLKEDYFKKIECFDSVEISGVEDRFNASLGTYHDLLKIIKDKDFLDNEENEDILEDIVLTLTLFEDREMIEERLKTYAHLFDDKVMKQLKRRRYTGWGRLSRKLINGIRDKQSGKTILDFLKSDGFANRNFMQLIHDDSLTFKEDIQKAQVSGQGDSLHEHIANLAGSPAIKKGILQTVKVVDELVKVMGRHKPENIVIEMARENQTTQKGQKNSRERMKRIEEGIKELGSQILKEHPVENTQLQNEKLYLYYLQNGRDMYVDQELDINRLSDYDVDHIVPQSFLKDDSIDNKVLTRSDKNRGKSDNVPSEEVVKKMKNYWRQLLNAKLITQRKFDNLTKAERGGLSELDKAGFIKRQLVETRQITKHVAQILDSRMNTKYDENDKLIREVKVITLKSKLVSDFRKDFQFYKVREINNYHHAHDAYLNAVVGTALIKKYPKLESEFVYGDYKVYDVRKMIAKSEQEIGKATAKYFFYSNIMNFFKTEITLANGEIRKRPLIETNGETGEIVWDKGRDFATVRKVLSMPQVNIVKKTEVQTGGFSKESIRPKRNSDKLIARKKDWDPKKYGGFVSPTVAYSVLVVAKVEKGKSKKLKSVKELLGITIMERSSFEKNPIDFLEAKGYKEVKKDLIIKLPKYSLFELENGRKRMLASARFLQKGNELALPSKYVNFLYLASHYEKLKGSPEDNEQKQLFVEQHKHYLDEIIEQISEFSKRVILADANLDKVLSAYNKHRDKPIREQAENIIHLFTLTNLGAPRAFKYFDTTIDRKVYRSTKEVLDATLIHQSITGLYETRIDLSQLGGDSGGSKRTADGSEFEPKKKRKV

SEQ ID NO: 181 - protein, 1291 aa, Artificial Sequence; identical to SEQ ID NO: 171
  Synthetic

SEQ ID NO: 182 - protein, 1489 aa, Artificial Sequence; identical to SEQ ID NO: 172
  Synthetic

SEQ ID NO: 183 - protein, 1626 aa, Artificial Sequence
  Synthetic
MKRTADGSEFESPKKKRKVSEVEFSHEYWMRHALTLAKRARDEREVPVGAVLVLNNRVIGEGWNRAIGLHDPTAHAEIMALRQGGLVMQNYRLIDATLYVTFEPCVMCAGAMIHSRIGRVVFGVRNSKRGAAGSLMNVLNYPGMNHRVEITEGILADECAALLCDFYRMPRQVFNAQKKAQSSINSGGSSGGSSGSETPGTSESATPESSGGSSGGSEIGKATAKYFFYSNIMNFFKTEITLANGEIRKRPLIETNGETGEIVWDKGRDFATVRKVLSMPQVNIVKKTEVQTGGFSKESILPKRNSDKLIARKKDWDPKKYGGFDSPTVAYSVLVVAKVEKGKSKKLKSVKELLGITIMERSSFEKNPIDFLEAKGYKEVKKDLIIKLPKYSLFELENGRKRMLASAGELQKGNELALPSKYVNFLYLASHYEKLKGSPEDNEQKQLFVEQHKHYLDEIIEQISEFSKRVILADANLDKVLSAYNKHRDKPIREQAENIIHLFTLTNLGAPAAFKYFDTTIDRKRYTSTKEVLDATLIHQSITGLYETRIDLSQLGGDGGSGGSGGSGGSGGSGGSGGMDKKYSIGLAIGTNSVGWAVITDEYKVPSKKFKVLGNTDRHSIKKNLIGALLFDSGETAEATRLKRTARRRYTRRKNRICYLQEIFSNEMAKVDDSFFHRLEESFLVEEDKKHERHPIFGNIVDEVAYHEKYPTIYHLRKKLVDSTDKADLRLIYLALAHMIKFRGHFLIEGDLNPDNSDVDKLFIQLVQTYNQLFEENPINASGVDAKAILSARLSKSRRLENLIAQLPGEKKNGLFGNLIALSLGLTPNFKSNFDLAEDAKLQLSKDTYDDDLDNLLAQIGDQYADLFLAAKNLSDAILLSDILRVNTEITKAPLSASMIKRYDEHHQDLTLLKALVRQQLPEKYKEIFFDQSKNGYAGYIDGGASQEEFYKFIKPILEKMDGTEELLVKLNREDLLRKQRTFDNGSIPHQIHLGELHAILRRQEDFYPFLKDNREKIEKILTFRIPYYVGPLARGNSRFAWMTRKSEETITPWNFEEVVDKGASAQSFIERMTNFDKNLPNEKVLPKHSLLYEYFTVYNELTKVKYVTEGMRKPAFLSGEQKKAIVDLLFKTNRKVTVKQLKEDYFKKIECFDSVEISGVEDRFNASLGTYHDLLKIIKDKDFLDNEENEDILEDIVLTLTLFEDREMIEERLKTYAHLFDDKVMKQLKRRRYTGWGRLSRKLINGIRDKQSGKTILDFLKSDGFANRNFMQLIHDDSLTFKEDIQKAQVSGQGDSLHEHIANLAGSPAIKKGILQTVKVVDELVKVMGRHKPENIVIEMARENQTTQKGQKNSRERMKRIEEGIKELGSQILKEHPVENTQLQNEKLYLYYLQNGRDMYVDQELDINRLSDYDVDHIVPQSFLKDDSIDNKVLTRSDKNRGKSDNVPSEEVVKKMKNYWRQLLNAKLITQRKFDNLTKAERGGLSELDKAGFIKRQLVETRQITKHVAQILDSRMNTKYDENDKLIREVKVITLKSKLVSDFRKDFQFYKVREINNYHHAHDAYLNAVVGTALIKKYPKLESEFVYGDYKVYDVRKMIAKSEQSGGSKRTADGSEFEPKKKRKV

SEQ ID NO: 184 - protein, 1824 aa, Artificial Sequence
  Synthetic
MKRTADGSEFESPKKKRKVSEVEFSHEYWMRHALTLAKRAWDEREVPVGAVLVHNNRVIGEGWNRPIGRHDPTAHAEIMALRQGGLVMQNYRLIDATLYVTLEPCVMCAGAMIHSRIGRVVFGARDAKTGAAGSLMDVLHHPGMNHRVEITEGILADECAALLSDFFRMRRQEIKAQKKAQSSTDSGGSSGGSSGSETPGTSESATPESSGGSSGGSSEVEFSHEYWMRHALTLAKRARDEREVPVGAVLVLNNRVIGEGWNRAIGLHDPTAHAEIMALRQGGLVMQNYRLIDATLYVTFEPCVMCAGAMIHSRIGRVVFGVRNSKRGAAGSLMNVLNYPGMNHRVEITEGILADECAALLCDFYRMPRQVFNAQKKAQSSINSGGSSGGSSGSETPGTSESATPESSGGSSGGSEIGKATAKYFFYSNIMNFFKTEITLANGEIRKRPLIETNGETGEIVWDKGRDFATVRKVLSMPQVNIVKKTEVQTGGFSKESILPKRNSDKLIARKKDWDPKKYGGFDSPTVAYSVLVVAKVEKGKSKKLKSVKELLGITIMERSSFEKNPIDFLEAKGYKEVKKDLIIKLPKYSLFELENGRKRMLASAGELQKGNELALPSKYVNFLYLASHYEKLKGSPEDNEQKQLFVEQHKHYLDEIIEQISEFSKRVILADANLDKVLSAYNKHRDKPIREQAENIIHLFTLTNLGAPAAFKYFDTTIDRKRYTSTKEVLDATLIHQSITGLYETRIDLSQLGGDGGSGGSGGSGGSGGSGGSGGMDKKYSIGLAIGTNSVGWAVITDEYKVPSKKFKVLGNTDRHSIKKNLIGALLFDSGETAEATRLKRTARRRYTRRKNRICYLQEIFSNEMAKVDDSFFHRLEESFLVEEDKKHERHPIFGNIVDEVAYHEKYPTIYHLRKKLVDSTDKADLRLIYLALAHMIKFRGHFLIEGDLNPDNSDVDKLFIQLVQTYNQLFEENPINASGVDAKAILSARLSKSRRLENLIAQLPGEKKNGLFGNLIALSLGLTPNFKSNFDLAEDAKLQLSKDTYDDDLDNLLAQIGDQYADLFLAAKNLSDAILLSDILRVNTEITKAPLSASMIKRYDEHHQDLTLLKALVRQQLPEKYKEIFFDQSKNGYAGYIDGGASQEEFYKFIKPILEKMDGTEELLVKLNREDLLRKQRTFDNGSIPHQIHLGELHAILRRQEDFYPFLKDNREKIEKILTFRIPYYVGPLARGNSRFAWMTRKSEETITPWNFEEVVDKGASAQSFIERMTNFDKNLPNEKVLPKHSLLYEYFTVYNELTKVKYVTEGMRKPAFLSGEQKKAIVDLLFKTNRKVTVKQLKEDYFKKIECFDSVEISGVEDRFNASLGTYHDLLKIIKDKDFLDNEENEDILEDIVLTLTLFEDREMIEERLKTYAHLFDDKVMKQLKRRRYTGWGRLSRKLINGIRDKQSGKTILDFLKSDGFANRNFMQLIHDDSLTFKEDIQKAQVSGQGDSLHEHIANLAGSPAIKKGILQTVKVVDELVKVMGRHKPENIVIEMARENQTTQKGQKNSRERMKRIEEGIKELGSQILKEHPVENTQLQNEKLYLYYLQNGRDMYVDQELDINRLSDYDVDHIVPQSFLKDDSIDNKVLTRSDKNRGKSDNVPSEEVVKKMKNYWRQLLNAKLITQRKFDNLTKAERGGLSELDKAGFIKRQLVETRQITKHVAQILDSRMNTKYDENDKLIREVKVITLKSKLVSDFRKDFQFYKVREINNYHHAHDAYLNAVVGTALIKKYPKLESEFVYGDYKVYDVRKMIAKSEQSGGSKRTADGSEFEPKKKRKV

SEQ ID NO: 185 - protein, 1625 aa, Artificial Sequence
  Synthetic
MKRTADGSEFESPKKKRKVSEVEFSHEYWMRHALTLAKRARDEREVPVGAVLVLNNRVIGEGWNRAIGLHDPTAHAEIMALRQGGLVMQNYRLIDATLYVTFEPCVMCAGAMIHSRIGRVVFGVRNSKRGAAGSLMNVLNYPGMNHRVEITEGILADECAALLCDFYRMPRQVFNAQKKAQSSINSGGSSGGSSGSETPGTSESATPESSGGSSGGSNIMNFFKTEITLANGEIRKRPLIETNGETGEIVWDKGRDFATVRKVLSMPQVNIVKKTEVQTGGFSKESILPKRNSDKLIARKKDWDPKKYGGFDSPTVAYSVLVVAKVEKGKSKKLKSVKELLGITIMERSSFEKNPIDFLEAKGYKEVKKDLIIKLPKYSLFELENGRKRMLASAGELQKGNELALPSKYVNFLYLASHYEKLKGSPEDNEQKQLFVEQHKHYLDEIIEQISEFSKRVILADANLDKVLSAYNKHRDKPIREQAENIIHLFTLTNLGAPAAFKYFDTTIDRKRYTSTKEVLDATLIHQSITGLYETRIDLSQLGGDGGSGGSGGSGGSGGSGGSGGDKKYSIGLAIGTNSVGWAVITDEYKVPSKKFKVLGNTDRHSIKKNLIGALLFDSGETAEATRLKRTARRRYTRRKNRICYLQEIFSNEMAKVDDSFFHRLEESFLVEEDKKHERHPIFGNIVDEVAYHEKYPTIYHLRKKLVDSTDKADLRLIYLALAHMIKFRGHFLIEGDLNPDNSDVDKLFIQLVQTYNQLFEENPINASGVDAKAILSARLSKSRRLENLIAQLPGEKKNGLFGNLIALSLGLTPNFKSNFDLAEDAKLQLSKDTYDDDLDNLLAQIGDQYADLFLAAKNLSDAILLSDILRVNTEITKAPLSASMIKRYDEHHQDLTLLKALVRQQLPEKYKEIFFDQSKNGYAGYIDGGASQEEFYKFIKPILEKMDGTEELLVKLNREDLLRKQRTFDNGSIPHQIHLGELHAILRRQEDFYPFLKDNREKIEKILTFRIPYYVGPLARGNSRFAWMTRKSEETITPWNFEEVVDKGASAQSFIERMTNFDKNLPNEKVLPKHSLLYEYFTVYNELTKVKYVTEGMRKPAFLSGEQKKAIVDLLFKTNRKVTVKQLKEDYFKKIECFDSVEISGVEDRFNASLGTYHDLLKIIKDKDFLDNEENEDILEDIVLTLTLFEDREMIEERLKTYAHLFDDKVMKQLKRRRYTGWGRLSRKLINGIRDKQSGKTILDFLKSDGFANRNFMQLIHDDSLTFKEDIQKAQVSGQGDSLHEHIANLAGSPAIKKGILQTVKVVDELVKVMGRHKPENIVIEMARENQTTQKGQKNSRERMKRIEEGIKELGSQILKEHPVENTQLQNEKLYLYYLQNGRDMYVDQELDINRLSDYDVDHIVPQSFLKDDSIDNKVLTRSDKNRGKSDNVPSEEVVKKMKNYWRQLLNAKLITQRKFDNLTKAERGGLSELDKAGFIKRQLVETRQITKHVAQILDSRMNTKYDENDKLIREVKVITLKSKLVSDFRKDFQFYKVREINNYHHAHDAYLNAVVGTALIKKYPKLESEFVYGDYKVYDVRKMIAKSEQEIGKATAKYFFYSSGGSKRTADGSEFEPKKKRKV

SEQ ID NO: 186 - protein, 1605 aa, Artificial Sequence; identical to SEQ ID NO: 169
  Synthetic

SEQ ID NO: 187 - protein, 1605 aa, Artificial Sequence; identical to SEQ ID NO: 169
  Synthetic

SEQ ID NO: 188 - protein, 1605 aa, Artificial Sequence
  Synthetic
MKRTADGSEFESPKKKRKVSEVEFSHEYWMRHALTLAKRARDEREVPVGAVLVLNNRVIGEGWNRAIGLHDPTAHAEIMALRQGGLVMQNYRLIDATLYVTFEPCVMCAGAMIHSRIGRVVFGWRNSKRGAAGSLMNVLNYPGMNHRVEITEGILADECAALLCDFYRMPRQVFNAQKKAQSSINSGGSSGGSSGSETPGTSESATPESSGGSSGGSDKKYSIGLAIGTNSVGWAVITDEYKVPSKKFKVLGNTDRHSIKKNLIGALLFDSGETAEATRLKRTARRRYTRRKNRICYLQEIFSNEMAKVDDSFFHRLEESFLVEEDKKHERHPIFGNIVDEVAYHEKYPTIYHLRKKLVDSTDKADLRLIYLALAHMIKFRGHFLIEGDLNPDNSDVDKLFIQLVQTYNQLFEENPINASGVDAKAILSARLSKSRRLENLIAQLPGEKKNGLFGNLIALSLGLTPNFKSNFDLAEDAKLQLSKDTYDDDLDNLLAQIGDQYADLFLAAKNLSDAILLSDILRVNTEITKAPLSASMIKRYDEHHQDLTLLKALVRQQLPEKYKEIFFDQSKNGYAGYIDGGASQEEFYKFIKPILEKMDGTEELLVKLNREDLLRKQRTFDNGSIPHQIHLGELHAILRRQEDFYPFLKDNREKIEKILTFRIPYYVGPLARGNSRFAWMTRKSEETITPWNFEEVVDKGASAQSFIERMTNFDKNLPNEKVLPKHSLLYEYFTVYNELTKVKYVTEGMRKPAFLSGEQKKAIVDLLFKTNRKVTVKQLKEDYFKKIECFDSVEISGVEDRFNASLGTYHDLLKIIKDKDFLDNEENEDILEDIVLTLTLFEDREMIEERLKTYAHLFDDKVMKQLKRRRYTGWGRLSRKLINGIRDKQSGKTILDFLKSDGFANRNFMQLIHDDSLTFKEDIQKAQVSGQGDSLHEHIANLAGSPAIKKGILQTVKVVDELVKVMGRHKPENIVIEMARENQTTQKGQKNSRERMKRIEEGIKELGSQILKEHPVENTQLQNEKLYLYYLQNGRDMYVDQELDINRLSDYDVDHIVPQSFLKDDSIDNKVLTRSDKNRGKSDNVPSEEVVKKMKNYWRQLLNAKLITQRKFDNLTKAERGGLSELDKAGFIKRQLVETRQITKHVAQILDSRMNTKYDENDKLIREVKVITLKSKLVSDFRKDFQFYKVREINNYHHAHDAYLNAVVGTALIKKYPKLESEFVYGDYKVYDVRKMIAKSEQEIGKATAKYFFYSNIMNFFKTEITLANGEIRKRPLIETNGETGEIVWDKGRDFATVRKVLSMPQVNIVKKTEVQTGGFSKESILPKRNSDKLIARKKDWDPKKYGGFDSPTVAYSVLVVAKVEKGKSKKLKSVKELLGITIMERSSFEKNPIDFLEAKGYKEVKKDLIIKLPKYSLFELENGRKRMLASAGELQKGNELALPSKYVNFLYLASHYEKLKGSPEDNEQKQLFVEQHKHYLDEIIEQISEFSKRVILADANLDKVLSAYNKHRDKPIREQAENIIHLFTLTNLGAPAAFKYFDTTIDRKRYTSTKEVLDATLIHQSITGLYETRIDLSQLGGDSGGSKRTADGSEFEPKKKRKV

SEQ ID NO: 189 - DNA, 30 bp, Artificial Sequence
  Synthetic
ttccgcaagatgtttgagtgataacttaaa

SEQ ID NO: 190 - protein, 6 aa, Artificial Sequence
  Synthetic
FRKMFE

SEQ ID NO: 191 - DNA, 30 bp, Artificial Sequence
  Synthetic
tttaagttatcactcaaacatcttgcggaa

SEQ ID NO: 192 - DNA, 30 bp, Artificial Sequence
  Synthetic
ttccgcaagatgtttgagcgacaacttaaa

SEQ ID NO: 193 - protein, 10 aa, Artificial Sequence
  Synthetic
FRKMFERQLK

SEQ ID NO: 194 - DNA, 30 bp, Artificial Sequence
  Synthetic
tttaagttgtcgctcaaacatcttgcggaa

SEQ ID NO: 195 - DNA, 23 bp, Artificial Sequence
  Synthetic
tttatcacaggctccaggaaggg

SEQ ID NO: 196 - DNA, 22 bp, Artificial Sequence
  Synthetic
gtgggaaggggcccccaagagg

SEQ ID NO: 197 - DNA, 23 bp, Artificial Sequence
  Synthetic
atatttgcattgagatagtgtgg

SEQ ID NO: 198 - DNA, 23 bp, Artificial Sequence
  Synthetic
gacaaaccagaagccgctcctgg

SEQ ID NO: 199 - DNA, 23 bp, Artificial Sequence
  Synthetic
gttcacacccatgacgaacatgg

SEQ ID NO: 200 - DNA, 23 bp, Artificial Sequence
  Synthetic
gaacacaaagcatagactgcggg

SEQ ID NO: 201 - DNA, 23 bp, Artificial Sequence
  Synthetic
gaagaccaaggatagactgctgg

SEQ ID NO: 202 - DNA, 28 bp, Artificial Sequence
  Synthetic
gtggtagacagcatgtgtcctaaagggt

SEQ ID NO: 203 - DNA, 28 bp, Artificial Sequence
  Synthetic
atttacagcctggcctttggggtcgggt

SEQ ID NO: 204 - DNA, 28 bp, Artificial Sequence
  Synthetic
ggagagaaagagaagttgattgatgggt

SEQ ID NO: 205 - DNA, 28 bp, Artificial Sequence
  Synthetic
gtgtcaggtaatgtgctaaacagagagt

SEQ ID NO: 206 - DNA, 27 bp, Artificial Sequence
  Synthetic
tttctgctgcaagtaagcatgcatttg

SEQ ID NO: 207 - DNA, 27 bp, Artificial Sequence
  Synthetic
tttcctagacaggggctagtatgtgca

SEQ ID NO: 208 - DNA, 27 bp, Artificial Sequence
  Synthetic
tttgcagctattcaggctggcccgccc

SEQ ID NO: 209 - DNA, 23 bp, Artificial Sequence
  Synthetic
gacaaaccagaagccgctcctgg

SEQ ID NO: 210 - DNA, 23 bp, Artificial Sequence
  Synthetic
gttcacacccatgacgaacatgg

SEQ ID NO: 211 - DNA, 23 bp, Artificial Sequence
  Synthetic
gaacacaaagcatagactgcggg

SEQ ID NO: 212 - DNA, 23 bp, Artificial Sequence
  Synthetic
gaagaccaaggatagactgctgg

SEQ ID NO: 213 - DNA, 23 bp, Artificial Sequence
  Synthetic
gtggggaaggggcccccaagagg

SEQ ID NO: 214 - DNA, 23 bp, Artificial Sequence
  Synthetic
ggtgagtgagtgtgtgcgtgtgg

SEQ ID NO: 215 - DNA, 23 bp, Artificial Sequence
  Synthetic
gtcatcttagtcattacctgagg

SEQ ID NO: 216 - DNA, 28 bp, Artificial Sequence
  Synthetic
gtggtagacagcatgtgtcctaaagggt

SEQ ID NO: 217 - DNA, 28 bp, Artificial Sequence
  Synthetic
atttacagcctggcctttggggtcgggt

SEQ ID NO: 218 - DNA, 28 bp, Artificial Sequence
  Synthetic
ggagagaaagagaagttgattgatgggt

SEQ ID NO: 219 - DNA, 28 bp, Artificial Sequence
  Synthetic
gtgtcaggtaatgtgctaaacagagagt

SEQ ID NO: 220 - DNA, 28 bp, Artificial Sequence
  Synthetic
atgcattaactgaaaatggtcaaggagt

SEQ ID NO: 221 - DNA, 27 bp, Artificial Sequence
  Synthetic
tttctgctgcaagtaagcatgcatttg

SEQ ID NO: 222 - DNA, 27 bp, Artificial Sequence
  Synthetic
tttcctagacaggggctagtatgtgca

SEQ ID NO: 223 - DNA, 27 bp, Artificial Sequence
  Synthetic
tttgcagctattcaggctggcccgccc

SEQ ID NO: 224 - DNA, 23 bp, Artificial Sequence
  Synthetic
ggttaacaaggccaaactccaga

SEQ ID NO: 225 - DNA, 23 bp, Artificial Sequence
  Synthetic
gggtccagttccgggattagcga

SEQ ID NO: 226 - DNA, 23 bp, Artificial Sequence
  Synthetic
ggtactggccaaagattcaaagc

SEQ ID NO: 227 - DNA, 23 bp, Artificial Sequence
  Synthetic
gatgacccgtattatctggcagt

SEQ ID NO: 228 - DNA, 23 bp, Artificial Sequence
  Synthetic
ggaacaaggtactctttgagtgt

SEQ ID NO: 229 - DNA, 28 bp, Artificial Sequence
  Synthetic
ctggaaaattaccacatgctgtcacagt

SEQ ID NO: 230 - DNA, 28 bp, Artificial Sequence
  Synthetic
tacaaacatacagtttaatagaagaagt

SEQ ID NO: 231 - DNA, 28 bp, Artificial Sequence
  Synthetic
atgagaagtatgacaacagcctcaagat

SEQ ID NO: 232 - DNA, 28 bp, Artificial Sequence
  Synthetic
ggcagtcatcttagtcattacctgaggt

SEQ ID NO: 233 - DNA, 28 bp, Artificial Sequence
  Synthetic
ccaacatacatgcccctttgcctcaagt

SEQ ID NO: 234 - DNA, 28 bp, Artificial Sequence
  Synthetic
ggactagagtaggattgtacccctcagt

SEQ ID NO: 235 - DNA, 28 bp, Artificial Sequence
  Synthetic
gttagacacgcacagcatttcaggaagt

SEQ ID NO: 236 - DNA, 28 bp, Artificial Sequence
  Synthetic
ggctgagctaactgtgacagcatgtggt

SEQ ID NO: 237 - DNA, 28 bp, Artificial Sequence
  Synthetic
gggagctcaagcctgattccaaggagat

SEQ ID NO: 238 - DNA, 40 bp, Artificial Sequence
  Synthetic
gcttttatcacaggctccaggaagggtttggcctctgatt

SEQ ID NO: 239 - DNA, 40 bp, Artificial Sequence
  Synthetic
gcttttgtcgcaggctccaggaagggtttggcctctgatt

SEQ ID NO: 240 - DNA, 40 bp, Artificial Sequence; identical to SEQ ID NO: 238
  Synthetic

SEQ ID NO: 241 - DNA, 40 bp, Artificial Sequence
  Synthetic
gcttttgtcgcgggctccaggaagggtttggcctctgatt

SEQ ID NO: 242 - DNA, 40 bp, Artificial Sequence
  Synthetic
gcttttatcgcaggctccaggaagggtttggcctctgatt

SEQ ID NO: 243 - DNA, 6 bp, Artificial Sequence
  Synthetic
gctttt

SEQ ID NO: 244 - DNA, 40 bp, Artificial Sequence
  Synthetic
gcttttatcgcgggctccaggaagggtttggcctctgatt

SEQ ID NO: 245 - DNA, 12 bp, Artificial Sequence
  Synthetic
gcttttatcaca

SEQ ID NO: 246 - DNA, 40 bp, Artificial Sequence; identical to SEQ ID NO: 238
  Synthetic

SEQ ID NO: 247 - DNA, 40 bp, Artificial Sequence
  Synthetic
gcttttgtcacaggctccaggaagggtttggcctctgatt

SEQ ID NO: 248 - DNA, 40 bp, Artificial Sequence; identical to SEQ ID NO: 242
  Synthetic

SEQ ID NO: 249 - DNA, 40 bp, Artificial Sequence; identical to SEQ ID NO: 239
  Synthetic

SEQ ID NO: 250 - DNA, 40 bp, Artificial Sequence
  Synthetic
gcttttatcacgggctccaggaagggtttggcctctgatt

SEQ ID NO: 251 - DNA, 40 bp, Artificial Sequence; identical to SEQ ID NO: 244
  Synthetic

SEQ ID NO: 252 - DNA, 40 bp, Artificial Sequence; identical to SEQ ID NO: 241
  Synthetic

SEQ ID NO: 253 - DNA, 40 bp, Artificial Sequence
  Synthetic
gcttttgtcacgggctccaggaagggtttggcctctgatt

SEQ ID NO: 254 - DNA, 40 bp, Artificial Sequence
  Synthetic
cagatatttgcattgagatagtgtggggaaggggccccca

SEQ ID NO: 255 - DNA, 40 bp, Artificial Sequence; identical to SEQ ID NO: 254
  Synthetic

SEQ ID NO: 256 - DNA, 40 bp, Artificial Sequence
  Synthetic
cagatgtttgcgttgagatagtgtggggggggggccccca

SEQ ID NO: 257 - DNA, 40 bp, Artificial Sequence; identical to SEQ ID NO: 256
  Synthetic

SEQ ID NO: 258 - DNA, 40 bp, Artificial Sequence
  Synthetic
cagatatttgcattgagatagtgtggggggggggccccca

SEQ ID NO: 259 - DNA, 40 bp, Artificial Sequence
  Synthetic
cagatgtttgcattgagatagtgtggggggggggccccca

SEQ ID NO: 260 - DNA, 40 bp, Artificial Sequence
  Synthetic
cagatgtttgcgttgagatagtgtggggaaggggccccca

SEQ ID NO: 261 - DNA, 40 bp, Artificial Sequence; identical to SEQ ID NO: 260
  Synthetic

SEQ ID NO: 262 - DNA, 40 bp, Artificial Sequence; identical to SEQ ID NO: 259
  Synthetic

SEQ ID NO: 263 - DNA, 40 bp, Artificial Sequence; identical to SEQ ID NO: 258
  Synthetic

SEQ ID NO: 264 - DNA, 39 bp, Artificial Sequence
  Synthetic
cagatgtttgcgttgagatagtgtgggggggggccccca

SEQ ID NO: 265 - DNA, 39 bp, Artificial Sequence; identical to SEQ ID NO: 264
  Synthetic

SEQ ID NO: 266 - DNA, 40 bp, Artificial Sequence
  Synthetic
cagatgtttgcgttgagatagtgtgggggaggggccccca

SEQ ID NO: 267 - DNA, 40 bp, Artificial Sequence
  Synthetic
caggtgtttgcgttgagatagtgtggggaaggggccccca

SEQ ID NO: 268 - DNA, 40 bp, Artificial Sequence; identical to SEQ ID NO: 266
  Synthetic

SEQ ID NO: 269 - DNA, 40 bp, Artificial Sequence
  Synthetic
caggtgtttgcgttgagatagtgtggggggggggccccca

SEQ ID NO: 270 - DNA, 40 bp, Artificial Sequence; identical to SEQ ID NO: 267
  Synthetic

SEQ ID NO: 271 - DNA, 40 bp, Artificial Sequence; identical to SEQ ID NO: 269
  Synthetic

SEQ ID NO: 272 - DNA, 40 bp, Artificial Sequence
  Synthetic
cagatatttgcattgagatagtgtgggggaggggccccca

SEQ ID NO: 273 - DNA, 40 bp, Artificial Sequence
  Synthetic
cagatgtttgcattgagatagtgtggggaaggggccccca

SEQ ID NO: 274 - DNA, 40 bp, Artificial Sequence; identical to SEQ ID NO: 272
  Synthetic

SEQ ID NO: 275 - DNA, 40 bp, Artificial Sequence; identical to SEQ ID NO: 273
  Synthetic

SEQ ID NO: 276 - DNA, 39 bp, Artificial Sequence
  Synthetic
cagatatttgcattgagatagtgtgggggggggccccca

SEQ ID NO: 277 - DNA, 39 bp, Artificial Sequence; identical to SEQ ID NO: 276
  Synthetic

SEQ ID NO: 278 - DNA, 39 bp, Artificial Sequence
  Synthetic
cagatgtttgcattgagatagtgtgggggggggccccca

SEQ ID NO: 279 - DNA, 39 bp, Artificial Sequence; identical to SEQ ID NO: 278
  Synthetic

SEQ ID NO: 280 - DNA, 40 bp, Artificial Sequence
  Synthetic
cagatgtttgcattgagatagtgtgggggaggggccccca

SEQ ID NO: 281 - DNA, 40 bp, Artificial Sequence
  Synthetic
caggtgtttgcgttgagatagtgtgggggaggggccccca

SEQ ID NO: 282 - DNA, 40 bp, Artificial Sequence
  Synthetic
cagatatttgcgttgagatagtgtggggggggggccccca

SEQ ID NO: 283 - DNA, 40 bp, Artificial Sequence; identical to SEQ ID NO: 254
  Synthetic

SEQ ID NO: 284 - DNA, 40 bp, Artificial Sequence; identical to SEQ ID NO: 282
  Synthetic

SEQ ID NO: 285 - DNA, 40 bp, Artificial Sequence
  Synthetic
cagatgtttgcgttgagatggtgtggggggggggccccca

SEQ ID NO: 286 - DNA, 40 bp, Artificial Sequence; identical to SEQ ID NO: 256
  Synthetic

SEQ ID NO: 287 - DNA, 40 bp, Artificial Sequence; identical to SEQ ID NO: 285
  Synthetic

SEQ ID NO: 288 - DNA, 39 bp, Artificial Sequence
  Synthetic
caggtgtttgcgttgagatagtgtgggggggggccccca

SEQ ID NO: 289 - DNA, 39 bp, Artificial Sequence; identical to SEQ ID NO: 288
  Synthetic

SEQ ID NO: 290 - DNA, 40 bp, Artificial Sequence; identical to SEQ ID NO: 254
  Synthetic

SEQ ID NO: 291 - DNA, 40 bp, Artificial Sequence; identical to SEQ ID NO: 254
  Synthetic

SEQ ID NO: 292 - DNA, 40 bp, Artificial Sequence; identical to SEQ ID NO: 272
  Synthetic

SEQ ID NO: 293 - DNA, 40 bp, Artificial Sequence; identical to SEQ ID NO: 272
  Synthetic

SEQ ID NO: 294 - DNA, 40 bp, Artificial Sequence; identical to SEQ ID NO: 273
  Synthetic

SEQ ID NO: 295 - DNA, 40 bp, Artificial Sequence; identical to SEQ ID NO: 273
  Synthetic

SEQ ID NO: 296 - DNA, 40 bp, Artificial Sequence; identical to SEQ ID NO: 280
  Synthetic

SEQ ID NO: 297 - DNA, 40 bp, Artificial Sequence; identical to SEQ ID NO: 280
  Synthetic

SEQ ID NO: 298 - DNA, 40 bp, Artificial Sequence; identical to SEQ ID NO: 258
  Synthetic

SEQ ID NO: 299 - DNA, 40 bp, Artificial Sequence; identical to SEQ ID NO: 260
  Synthetic

SEQ ID NO: 300 - DNA, 40 bp, Artificial Sequence; identical to SEQ ID NO: 258
  Synthetic

SEQ ID NO: 301 - DNA, 40 bp, Artificial Sequence; identical to SEQ ID NO: 260
  Synthetic

SEQ ID NO: 302 - DNA, 40 bp, Artificial Sequence; identical to SEQ ID NO: 254
  Synthetic

SEQ ID NO: 303 - DNA, 40 bp, Artificial Sequence; identical to SEQ ID NO: 266
  Synthetic

SEQ ID NO: 304 - DNA, 40 bp, Artificial Sequence; identical to SEQ ID NO: 266
  Synthetic

SEQ ID NO: 305 - DNA, 40 bp, Artificial Sequence; identical to SEQ ID NO: 259
  Synthetic

SEQ ID NO: 306 - DNA, 40 bp, Artificial Sequence
  Synthetic
cagatatttgcattgagatagtgtggggagggggccccca

SEQ ID NO: 307 - DNA, 40 bp, Artificial Sequence; identical to SEQ ID NO: 259
  Synthetic

SEQ ID NO: 308 - DNA, 17 bp, Artificial Sequence
  Synthetic
cagatatttgcattgag

SEQ ID NO: 309 - DNA, 40 bp, Artificial Sequence; identical to SEQ ID NO: 254
  Synthetic

SEQ ID NO: 310 - DNA, 27 bp, Artificial Sequence
  Synthetic
gtcggcgcaactatcggtatcaagctg

SEQ ID NO: 311 - DNA, 38 bp, Artificial Sequence
  Synthetic
agtaagcagatagccgaacaaagttaccagaaggaaac

SEQ ID NO: 312 - RNA, 81 nt, Artificial Sequence
  Synthetic
guucaccuuucuuugucuguguuuuagagcuagaaauagcaaguuaaaauaaggcuaguccguuaucaacuugaaaaagug

SEQ ID NO: 313 - DNA, 59 bp, Artificial Sequence
  Synthetic
gttcggtggctccgtccgtgttcacctttctttgtctgtgggcgttttggttgctcttc

SEQ ID NO: 314 - DNA, 60 bp, Artificial Sequence
  Synthetic
cgaagagcaaccaaaacgcccacagacaaagaaaggtgaacacggacggagccaccgaag

SEQ ID NO: 315 - protein, 167 aa, E. coli
MSEVEFSHEYWMRHALTLAKRARDEREVPVGAVLVLNNRVIGEGWNRAIGLHDPTAHAEIMALRQGGLVMQNYRLIDATLYVTFEPCVMCAGAMIHSRIGRVVFGVRNAKTGAAGSLMDVLHYPGMNHRVEITEGILADECAALLCYFFRMPRQVFNAQKKAQSSTD

SEQ ID NO: 316 - protein, 167 aa, E. coli
MSEVEFSHEYWMRHALTLAKRARDEREVPVGAVLVLNNRVIGEGWNRAIGLHDPTAHAEIMALRQGGLVMQNYRLIDATLYVTFEPCVMCAGAMIHSRIGRVVFGWRNAKTGAAGSLMDVLHYPGMNHRVEITEGILADECAALLCYFFRMPRQVFNAQKKAQSSTD

SEQ ID NO: 317 - protein, 160 aa, Staphylococcus aureus
MGSHMTNDIYFMTLAIEEAKKAAQLGEVPIGAIITKDDEVIARAHNLRETLQQPTAHAEHIAIERAAKVLGSWRLEGCTLYVTLEPCVMCAGTIVMSRIPRVVYGADDPKGGCSGSLMNLLQQSNFNHRAIVDKGVLKEACSTLLTTFFKNLRANKKSTN

SEQ ID NO: 318 - protein, 161 aa, Bacillus subtilis
MTQDELYMKEAIKEAKKAEEKGEVPIGAVLVINGEIIARAHNLRETEQRSIAHAEMLVIDEACKALGTWRLEGATLYVTLEPCPMCAGAVVLSRVEKVVFGAFDPKGGCSGTLMNLLQEERFNHQAEVVSGVLEEECGGMLSAFFRELRKKKKAARKNLSE

SEQ ID NO: 319 - protein, 183 aa, Salmonella typhimurium
MPPAFITGVTSLSDVELDHEYWMRHALTLAKRAWDEREVPVGAVLVHNHRVIGEGWNRPIGRHDPTAHAEIMALRQGGLVLQNYRLLDTTLYVTLEPCVMCAGAMVHSRIGRVVFGARDAKTGAAGSLIDVLHHPGMNHRVEIIEGVLRDECATLLSDFFRMRRQEIKALKKADRAEGAGPAV

SEQ ID NO: 320 - protein, 164 aa, Shewanella putrefaciens
MDEYWMQVAMQMAEKAEAAGEVPVGAVLVKDGQQIATGYNLSISQHDPTAHAEILCLRSAGKKLENYRLLDATLYITLEPCAMCAGAMVHSRIARVVYGARDEKTGAAGTVVNLLQHPAFNHQVEVTSGVLAEACSAQLSRFFKRRRDEKKALKLAQRAQQGIE

SEQ ID NO: 321 - protein, 173 aa, Haemophilus influenzae F3031
MDAAKVRSEFDEKMMRYALELADKAEALGEIPVGAVLVDDARNIIGEGWNLSIVQSDPTAHAEIIALRNGAKNIQNYRLLNSTLYVTLEPCTMCAGAILHSRIKRLVFGASDYKTGAIGSRFHFFDDYKMNHTLEITSGVLAEECSQKLSTFFQKRREEKKIEKALLKSLSDK

SEQ ID NO: 322 - protein, 161 aa, Caulobacter crescentus
MRTDESEDQDHRMMRLALDAARAAAEAGETPVGAVILDPSTGEVIATAGNGPIAAHDPTAHAEIAAMRAAAAKLGNYRLTDLTLVVTLEPCAMCAGAISHARIGRVVFGADDPKGGAVVHGPKFFAQPTCHWRPEVTGGVLADESADLLRGFFRARRKAKI

SEQ ID NO: 323 - protein, 178 aa, Geobacter sulfurreducens
MSSLKKTPIRDDAYWMGKAIREAAKAAARDEVPIGAVIVRDGAVIGRGHNLREGSNDPSAHAEMIAIRQAARRSANWRLTGATLYVTLEPCLMCMGAIILARLERVVFGCYDPKGAAGSLYDLSADPRLNHQVRLSPGVCQEECGTMLSDFFRDLRRRKKAKATPALFIDERKVPPEP

SEQ ID NO: 324 - protein, 167 aa, E. coli
MSEVEFSHEYWMRHALTLAKRAWDEREVPVGAVLVHNNRVIGEGWNRPIGRHDPTAHAEIMALRQGGLVMQNYRLIDATLYVTLEPCVMCAGAMIHSRIGRVVFGARDAKTGAAGSLMDVLHHPGMNHRVEITEGILADECAALLSDFFRMRRQEIKAQKKAQSSTD

SEQ ID NO: 325 - protein, 178 aa, E. coli
MRRAFITGVFFLSEVEFSHEYWMRHALTLAKRAWDEREVPVGAVLVHNNRVIGEGWNRPIGRHDPTAHAEIMALRQGGLVMQNYRLIDATLYVTLEPCVMCAGAMIHSRIGRVVFGARDAKTGAAGSLMDVLHHPGMNHRVEITEGILADECAALLSDFFRMRRQEIKAQKKAQSSTD

SEQ ID NO: 326 - protein, 1368 aa, Streptococcus pyogenes [sequence omitted]

SEQ ID NO: 327 - DNA, 4104 bp, Streptococcus pyogenes
atggataaaaaatatagcattggcctggatattggcaccaacagcgtgggctgggcggtgattaccgatgaatataaagtgccgagcaaaaaatttaaagtgctgggcaacaccgatcgccatagcattaaaaaaaacctgattggcgcgctgctgtttgatagcggcgaaaccgcggaagcgacccgcctgaaacgcaccgcgcgccgccgctatacccgccgcaaaaaccgcatttgctatctgcaggaaatttttagcaacgaaatggcgaaagtggatgatagcttttttcatcgcctggaagaaagctttctggtggaagaagataaaaaacatgaacgccatccgatttttggcaacattgtggatgaagtggcgtatcatgaaaaatatccgaccatttatcatctgcgcaaaaaactggtggatagcaccgataaagcggatctgcgcctgatttatctggcgctggcgcatatgattaaatttcgcggccattttctgattgaaggcgatctgaacccggataacagcgatgtggataaactgtttattcagctggtgcagacctataaccagctgtttgaagaaaacccgattaacgcgagcggcgtggatgcgaaagcgattctgagcgcgcgcctgagcaaaagccgccgcctggaaaacctgattgcgcagctgccgggcgaaaaaaaaaacggcctgtttggcaacctgattgcgctgagcctgggcctgaccccgaactttaaaagcaactttgatctggcggaagatgcgaaactgcagctgagcaaagatacctatgatgatgatctggataacctgctggcgcagattggcgatcagtatgcggatctgtttctggcggcgaaaaacctgagcgatgcgattctgctgagcgatattctgcgcgtgaacaccgaaattaccaaagcgccgctgagcgcgagcatgattaaacgctatgatgaacatcatcaggatctgaccctgctgaaagcgctggtgcgccagcagctgccggaaaaatataaagaaattttttttgatcagagcaaaaacggctatgcgggctatattgatggcggcgcgagccaggaagaattttataaatttattaaaccgattctggaaaaaatggatggcaccgaagaactgctggtgaaactgaaccgcgaagatctgctgcgcaaacagcgcacctttgataacggcagcattccgcatcagattcatctgggcgaactgcatgcgattctgcgccgccaggaagatttttatccgtttctgaaagataaccgcgaaaaaattgaaaaaattctgacctttcgcattccgtattatgtgggcccgctggcgcgcggcaacagccgctttgcgtggatgacccgcaaaagcgaagaaaccattaccccgtggaactttgaagaagtggtggataaaggcgcgagcgcgcagagctttattgaacgcatgaccaactttgataaaaacctgccgaacgaaaaagtgctgccgaaacatagcctgctgtatgaatattttaccgtgtataacgaactgaccaaagtgaaatatgtgaccgaaggcatgcgcaaaccggcgtttctgagcggcgaacagaaaaaagcgattgtggatctgctgtttaaaaccaaccgcaaagtgaccgtgaaacagctgaaagaagattattttaaaaaaattgaatgctttgatagcgtggaaattagcggcgtggaagatcgctttaacgcgagcctgggcacctatcatgatctgctgaaaattattaaagataaagattttctggataacgaagaaaacgaagatattctggaagatattgtgctgaccctgaccctgtttgaagatcgcgaaatgattgaagaacgcctgaaaacctatgcgcatctgtttgatgataaagtgatgaaacagctgaaacgccgccgctataccggctggggccgcctgagccgcaaactgattaacggcattcgcgataaacagagcggcaaaaccattctggattttctgaaaagcgatggctttgcgaaccgcaactttatgcagctgattcatgatgatagcctgacctttaaagaagatattcagaaagcgcaggtgagcggccagggcgatagcctgcatgaacatattgcgaacctggcgggcagcccggcgattaaaaaaggcattctgcagaccgtgaaagtggtggatgaactggtgaaagtgatgggccgccataaaccggaaaacattgtgattgaaatggcgcgcgaaaaccagaccacccagaaaggccagaaaaacagccgcgaacgcatgaaacgcattgaagaaggcattaaagaactgggcagccagattctgaaagaacatccggtggaaaacacccagctgcagaacgaaaaactgtatctgtattatctgcagaacggccgcgatatgtatgtggatcaggaactggatattaaccgcctgagcgattatgatgtggatcatattgtgccgcagagctttctgaaagatgatagcattgataacaaagtgctgacccgcagcgataaaaaccgcggcaaaagcgataacgtgccgagcgaagaagtggtgaaaaaaatgaaaaactattggcgccagctgctgaacgcgaaactgattacccagcgcaaatttgataacctgaccaaagcggaacgcggcggcctgagcgaactggataaagcgggctttattaaacgccagctggtggaaacccgccagattaccaaacatgtggcgcagattctggatagccgcatgaacaccaaatatgatgaaaacgataaactgattcgcgaagtgaaagtgattaccctgaaaagcaaactggtgagcgattttcgcaaagattttcagttttataaagtgcgcgaaattaacaactatcatcatgcgcatgatgcgtatctgaacgcggtggtgggcaccgcgctgattaaaaaatatccgaaactggaaagcgaatttgtgtatggcgattataaagtgtatgatgtgcgcaaaatgattgcgaaaagcgaacaggaaattggcaaagcgaccgcgaaatattttttttatagcaacattatgaacttttttaaaaccgaaattaccctggcgaacggcgaaattcgcaaacgcccgctgattgaaaccaacggcgaaaccggcgaaattgtgtgggataaaggccgcgattttgcgaccgtgcgcaaagtgctgagcatgccgcaggtgaacattgtgaaaaaaaccgaagtgcagaccggcggctttagcaaagaaagcattctgccgaaacgcaacagcgataaactgattgcgcgcaaaaaagattgggatccgaaaaaatatggcggctttgatagcccgaccgtggcgtatagcgtgctggtggtggcgaaagtggaaaaaggcaaaagcaaaaaactgaaaagcgtgaaagaactgctgggcattaccattatggaacgcagcagctttgaaaaaaacccgattgattttctggaagcgaaaggctataaagaagtgaaaaaagatctgattattaaactgccgaaatatagcctgtttgaactggaaaacggccgcaaacgcatgctggcgagcgcgggcgaactgcagaaaggcaacgaactggcgctgccgagcaaatatgtgaactttctgtatctggcgagccattatgaaaaactgaaaggcagcccggaagataacgaacagaaacagctgtttgtggaacagcataaacattatctggatgaaattattgaacagattagcgaatttagcaaacgcgtgattctggcggatgcgaacctggataaagtgctgagcgcgtataacaaacatcgcgataaaccgattcgcgaacaggcggaaaacattattcatctgtttaccctgaccaacctgggcgcgccggcggcgtttaaatattttgataccaccattgatcgcaaacgctataccagcaccaaagaagtgctggatgcgaccctgattcatcagagcattaccggcctgtatgaaacccgcattgatctgagccagctgggcggcgat

SEQ ID NO: 328 - DNA, 4104 bp, Streptococcus pyogenes
atggataagaaatactcaataggcttagatatcggcacaaatagcgtcggatgggcggtgatcactgatgattataaggttccgtctaaaaagttcaaggttctgggaaatacagaccgccacagtatcaaaaaaaatcttataggggctcttttatttggcagtggagagacagcggaagcgactcgtctcaaacggacagctcgtagaaggtatacacgtcggaagaatcgtatttgttatctacaggagattttttcaaatgagatggcgaaagtagatgatagtttctttcatcgacttgaagagtcttttttggtggaagaagacaagaagcatgaacgtcatcctatttttggaaatatagtagatgaagttgcttatcatgagaaatatccaactatctatcatctgcgaaaaaaattggcagattctactgataaagcggatttgcgcttaatctatttggccttagcgcatatgattaagtttcgtggtcattttttgattgagggagatttaaatcctgataatagtgatgtggacaaactatttatccagttggtacaaatctacaatcaattatttgaagaaaaccctattaacgcaagtagagtagatgctaaagcgattctttctgcacgattgagtaaatcaagacgattagaaaatctcattgctcagctccccggtgagaagagaaatggcttgtttgggaatctcattgctttgtcattgggattgacccctaattttaaatcaaattttgatttggcagaagatgctaaattacagctttcaaaagatacttacgatgatgatttagataatttattggcgcaaattggagatcaatatgctgatttgtttttggcagctaagaatttatcagatgctattttactttcagatatcctaagagtaaatagtgaaataactaaggctcccctatcagcttcaatgattaagcgctacgatgaacatcatcaagacttgactcttttaaaagctttagttcgacaacaacttccagaaaagtataaagaaatcttttttgatcaatcaaaaaacggatatgcaggttatattgatgggggagctagccaagaagaattttataaatttatcaaaccaattttagaaaaaatggatggtactgaggaattattggtgaaactaaatcgtgaagatttgctgcgcaagcaacggacctttgacaacggctctattccccatcaaattcacttgggtgagctgcatgctattttgagaagacaagaagacttttatccatttttaaaagacaatcgtgagaagattgaaaaaatcttgacttttcgaattccttattatgttggtccattggcgcgtggcaatagtcgttttgcatggatgactcggaagtctgaagaaacaattaccccatggaattttgaagaagttgtcgataaaggtgcttcagctcaatcatttattgaacgcatgacaaactttgataaaaatcttccaaatgaaaaagtactaccaaaacatagtttgctttatgagtattttacggtttataacgaattgacaaaggtcaaatatgttactgagggaatgcgaaaaccagcatttctttcaggtgaacagaagaaagccattgttgatttactcttcaaaacaaatcgaaaagtaaccgttaagcaattaaaagaagattatttcaaaaaaatagaatgttttgatagtgttgaaatttcaggagttgaagatagatttaatgcttcattaggcgcctaccatgatttgctaaaaattattaaagataaagattttttggataatgaagaaaatgaagatatcttagaggatattgttttaacattgaccttatttgaagatagggggatgattgaggaaagacttaaaacatatgctcacctctttgatgataaggtgatgaaacagcttaaacgtcgccgttatactggttggggacgtttgtctcgaaaattgattaatggtattagggataagcaatctggcaaaacaatattagattttttgaaatcagatggttttgccaatcgcaattttatgcagctgatccatgatgatagtttgacatttaaagaagatattcaaaaagcacaggtgtctggacaaggccatagtttacatgaacagattgctaacttagctggcagtcctgctattaaaaaaggtattttacagactgtaaaaattgttgatgaactggtcaaagtaatggggcataagccagaaaatatcgttattgaaatggcacgtgaaaatcagacaactcaaaagggccagaaaaattcgcgagagcgtatgaaacgaatcgaagaaggtatcaaagaattaggaagtcagattcttaaagagcatcctgttgaaaatactcaattgcaaaatgaaaagctctatctctattatctacaaaatggaagagacatgtatgtggaccaagaattagatattaatcgtttaagtgattatgatgtcgatcacattgttccacaaagtttcattaaagacgattcaatagacaataaggtactaacgcgttctgataaaaatcgtggtaaatcggataacgttccaagtgaagaagtagtcaaaaagatgaaaaactattggagacaacttctaaacgccaagttaatcactcaacgtaagtttgataatttaacgaaagctgaacgtggaggtttgagtgaacttgataaagctggttttatcaaacgccaattggttgaaactcgccaaatcactaagcatgtggcacaaattttggatagtcgcatgaatactaaatacgatgaaaatgataaacttattcgagaggttaaagtgattaccttaaaatctaaattagtttctgacttccgaaaagatttccaattctataaagtacgtgagattaacaattaccatcatgcccatgatgcgtatctaaatgccgtcgttggaactgctttgattaagaaatatccaaaacttgaatcggagtttgtctatggtgattataaagtttatgatgttcgtaaaatgattgctaagtctgagcaagaaataggcaaagcaaccgcaaaatatttcttttactctaatatcatgaacttcttcaaaacagaaattacacttgcaaatggagagattcgcaaacgccctctaatcgaaactaatggggaaactggagaaattgtctgggataaagggcgagattttgccacagtgcgcaaagtattgtccatgccccaagtcaatattgtcaagaaaacagaagtacagacaggcggattctccaaggagtcaattttaccaaaaagaaattcggacaagcttattgctcgtaaaaaagactgggatccaaaaaaatatggtggttttgatagtccaacggtagcttattcagtcctagtggttgctaaggtggaaaaagggaaatcgaagaagttaaaatccgttaaagagttactagggatcacaattatggaaagaagttcctttgaaaaaaatccgattgactttttagaagctaaaggatataaggaagttaaaaaagacttaatcattaaactacctaaatatagtctttttgagttagaaaacggtcgtaaacggatgctggctagtgccggagaattacaaaaaggaaatgagctggctctgccaagcaaatatgtgaattttttatatttagctagtcattatgaaaagttgaagggtagtccagaagataacgaacaaaaacaattgtttgtggagcagcataagcattatttagatgagattattgagcaaatcagtgaattttctaagcgtgttattttagcagatgccaatttagataaagttcttagtgcatataacaaacatagagacaaaccaatacgtgaacaagcagaaaatattattcatttatttacgttgacgaatcttggagctcccgctgcttttaaatattttgatacaacaattgatcgtaaacgatatacgtctacaaaagaagttttagatgccactcttatccatcaatccatcactggtctttatgaaacacgcattgatttgagtcagctaggaggtgactga

SEQ ID NO: 329 - protein, 1367 aa, Streptococcus pyogenes
MDKKYSIGLDIGTNSVGWAVITDDYKVPSKKFKVLGNTDRHSIKKNLIGALLFGSGETAEATRLKRTARRRYTRRKNRICYLQEIFSNEMAKVDDSFFHRLEESFLVEEDKKHERHPIFGNIVDEVAYHEKYPTIYHLRKKLADSTDKADLRLIYLALAHMIKFRGHFLIEGDLNPDNSDVDKLFIQLVQIYNQLFEENPINASRVDAKAILSARLSKSRRLENLIAQLPGEKRNGLFGNLIALSLGLTPNFKSNFDLAEDAKLQLSKDTYDDDLDNLLAQIGDQYADLFLAAKNLSDAILLSDILRVNSEITKAPLSASMIKRYDEHHQDLTLLKALVRQQLPEKYKEIFFDQSKNGYAGYIDGGASQEEFYKFIKPILEKMDGTEELLVKLNREDLLRKQRTFDNGSIPHQIHLGELHAILRRQEDFYPFLKDNREKIEKILTFRIPYYVGPLARGNSRFAWMTRKSEETITPWNFEEVVDKGASAQSFIERMTNFDKNLPNEKVLPKHSLLYEYFTVYNELTKVKYVTEGMRKPAFLSGEQKKAIVDLLFKTNRKVTVKQLKEDYFKKIECFDSVEISGVEDRFNASLGAYHDLLKIIKDKDFLDNEENEDILEDIVLTLTLFEDRGMIEERLKTYAHLFDDKVMKQLKRRRYTGWGRLSRKLINGIRDKQSGKTILDFLKSDGFANRNFMQLIHDDSLTFKEDIQKAQVSGQGHSLHEQIANLAGSPAIKKGILQTVKIVDELVKVMGHKPENIVIEMARENQTTQKGQKNSRERMKRIEEGIKELGSQILKEHPVENTQLQNEKLYLYYLQNGRDMYVDQELDINRLSDYDVDHIVPQSFIKDDSIDNKVLTRSDKNRGKSDNVPSEEVVKKMKNYWRQLLNAKLITQRKFDNLTKAERGGLSELDKAGFIKRQLVETRQITKHVAQILDSRMNTKYDENDKLIREVKVITLKSKLVSDFRKDFQFYKVREINNYHHAHDAYLNAVVGTALIKKYPKLESEFVYGDYKVYDVRKMIAKSEQEIGKATAKYFFYSNIMNFFKTEITLANGEIRKRPLIETNGETGEIVWDKGRDFATVRKVLSMPQVNIVKKTEVQTGGFSKESILPKRNSDKLIARKKDWDPKKYGGFDSPTVAYSVLVVAKVEKGKSKKLKSVKELLGITIMERSSFEKNPIDFLEAKGYKEVKKDLIIKLPKYSLFELENGRKRMLASAGELQKGNELALPSKYVNFLYLASHYEKLKGSPEDNEQKQLFVEQHKHYLDEIIEQISEFSKRVILADANLDKVLSAYNKHRDKPIREQAENIIHLFTLTNLGAPAAFKYFDTTIDRKRYTSTKEVLDATLIHQSITGLYETRIDLSQLGGD

SEQ ID NO: 330 - DNA, 4212 bp, Streptococcus pyogenes
atggataaaaagtattctattggtttagacatcggcactaattccgttggatgggctgtcataaccgatgaatacaaagtaccttcaaagaaatttaaggtgttggggaacacagaccgtcattcgattaaaaagaatcttatcggtgccctcctattcgatagtggcgaaacggcagaggcgactcgcctgaaacgaaccgctcggagaaggtatacacgtcgcaagaaccgaatatgttacttacaagaaatttttagcaatgagatggccaaagttgacgattctttctttcaccgtttggaagagtccttccttgtcgaagaggacaagaaacatgaacggcaccccatctttggaaacatagtagatgaggtggcatatcatgaaaagtacccaacgatttatcacctcagaaaaaagctagttgactcaactgataaagcggacctgaggttaatctacttggctcttgcccatatgataaagttccgtgggcactttctcattgagggtgatctaaatccggacaactcggatgtcgacaaactgttcatccagttagtacaaacctataatcagttgtttgaagagaaccctataaatgcaagtggcgtggatgcgaaggctattcttagcgcccgcctctctaaatcccgacggctagaaaacctgatcgcacaattacccggagagaagaaaaatgggttgttcggtaaccttatagcgctctcactaggcctgacaccaaattttaagtcgaacttcgacttagctgaagatgccaaattgcagcttagtaaggacacgtacgatgacgatctcgacaatctactggcacaaattggagatcagtatgcggacttatttttggctgccaaaaaccttagcgatgcaatcctcctatctgacatactgagagttaatactgagattaccaaggcgccgttatccgcttcaatgatcaaaaggtacgatgaacatcaccaagacttgacacttctcaaggccctagtccgtcagcaactgcctgagaaatataaggaaatattctttgatcagtcgaaaaacgggtacgcaggttatattgacggcggagcgagtcaagaggaattctacaagtttatcaaacccatattagagaagatggatgggacggaagagttgcttgtaaaactcaatcgcgaagatctactgcgaaagcagcggactttcgacaacggtagcattccacatcaaatccacttaggcgaattgcatgctatacttagaaggcaggaggatttttatccgttcctcaaagacaatcgtgaaaagattgagaaaatcctaacctttcgcataccttactatgtgggacccctggcccgagggaactctcggttcgcatggatgacaagaaagtccgaagaaacgattactccatggaattttgaggaagttgtcgataaaggtgcgtcagctcaatcgttcatcgagaggatgaccaactttgacaagaatttaccgaacgaaaaagtattgcctaagcacagtttactttacgagtatttcacagtgtacaatgaactcacgaaagttaagtatgtcactgagggcatgcgtaaacccgcctttctaagcggagaacagaagaaagcaatagtagatctgttattcaagaccaaccgcaaagtgacagttaagcaattgaaagaggactactttaagaaaattgaatgcttcgattctgtcgagatctccggggtagaagatcgatttaatgcgtcacttggtacgtatcatgacctcctaaagataattaaagataaggacttcctggataacgaagagaatgaagatatcttagaagatatagtgttgactcttaccctctttgaagatcgggaaatgattgaggaaagactaaaaacatacgctcacctgttcgacgataaggttatgaaacagttaaagaggcgtcgctatacgggctggggacgattgtcgcggaaacttatcaacgggataagagacaagcaaagtggtaaaactattctcgattttctaaagagcgacggcttcgccaataggaactttatgcagctgatccatgatgactctttaaccttcaaagaggatatacaaaaggcacaggtttccggacaaggggactcattgcacgaacatattgcgaatcttgctggttcgccagccatcaaaaagggcatactccagacagtcaaagtagtggatgagctagttaaggtcatgggacgtcacaaaccggaaaacattgtaatcgagatggcacgcgaaaatcaaacgactcagaaggggcaaaaaaacagtcgagagcggatgaagagaatagaagagggtattaaagaactgggcagccagatcttaaaggagcatcctgtggaaaatacccaattgcagaacgagaaactttacctctattacctacaaaatggaagggacatgtatgttgatcaggaactggacataaaccgtttatctgattacgacgtcgatcacattgtaccccaatcctttttgaaggacgattcaatcgacaataaagtgcttacacgctcggataagaaccgagggaaaagtgacaatgttccaagcgaggaagtcgtaaagaaaatgaagaactattggcggcagctcctaaatgcgaaactgataacgcaaagaaagttcgataacttaactaaagctgagaggggtggcttgtctgaacttgacaaggccggatttattaaacgtcagctcgtggaaacccgccaaatcacaaagcatgttgcacagatactagattcccgaatgaatacgaaatacgacgagaacgataagctgattcgggaagtcaaagtaatcactttaaagtcaaaattggtgtcggacttcagaaaggattttcaattctataaagttagggagataaataactaccaccatgcgcacgacgcttatcttaatgccgtcgtagggaccgcactcattaagaaatacccgaagctagaaagtgagtttgtgtatggtgattacaaagtttatgacgtccgtaagatgatcgcgaaaagcgaacaggagataggcaaggctacagccaaatacttcttttattctaacattatgaatttctttaagacggaaatcactctggcaaacggagagatacgcaaacgacctttaattgaaaccaatggggagacaggtgaaatcgtatgggataagggccgggacttcgcgacggtgagaaaagttttgtccatgccccaagtcaacatagtaaagaaaactgaggtgcagaccggagggttttcaaaggaatcgattcttccaaaaaggaatagtgataagctcatcgctcgtaaaaaggactgggacccgaaaaagtacggtggcttcgatagccctacagttgcctattctgtcctagtagtggcaaaagttgagaagggaaaatccaagaaactgaagtcagtcaaagaattattggggataacgattatggagcgctcgtcttttgaaaagaaccccatcgacttccttgaggcgaaaggttacaaggaagtaaaaaaggatctcataattaaactaccaaagtatagtctgtttgagttagaaaatggccgaaaacggatgttggctagcgccggagagcttcaaaaggggaacgaactcgcactaccgtctaaatacgtgaatttcctgtatttagcgtcccattacgagaagttgaaaggttcacctgaagataacgaacagaagcaactttttgttgagcagcacaaacattatctcgacgaaatcatagagcaaatttcggaattcagtaagagagtcatcctagctgatgccaatctggacaaagtattaagcgcatacaacaagcacagggataaacccatacgtgagcaggcggaaaatattatccatttgtttactcttaccaacctcggcgctccagccgcattcaagtattttgacacaacgatagatcgcaaacgatacacttctaccaaggaggtgctagacgcgacactgattcaccaatccatcacgggattatatgaaactcggatagatttgtcacagcttgggggtgacggatcccccaagaagaagaggaaagtctcgagcgactacaaagaccatgacggtgattataaagatcatgacatcgattacaaggatgacgatgacaaggctgcagga

SEQ ID NO: 331 - protein, 1404 aa, Streptococcus pyogenes
MDKKYSIGLDIGTNSVGWAVITDEYKVPSKKFKVLGNTDRHSIKKNLIGALLFDSGETAEATRLKRTARRRYTRRKNRICYLQEIFSNEMAKVDDSFFHRLEESFLVEEDKKHERHPIFGNIVDEVAYHEKYPTIYHLRKKLVDSTDKADLRLIYLALAHMIKFRGHFLIEGDLNPDNSDVDKLFIQLVQTYNQLFEENPINASGVDAKAILSARLSKSRRLENLIAQLPGEKKNGLFGNLIALSLGLTPNFKSNFDLAEDAKLQLSKDTYDDDLDNLLAQIGDQYADLFLAAKNLSDAILLSDILRVNTEITKAPLSASMIKRYDEHHQDLTLLKALVRQQLPEKYKEIFFDQSKNGYAGYIDGGASQEEFYKFIKPILEKMDGTEELLVKLNREDLLRKQRTFDNGSIPHQIHLGELHAILRRQEDFYPFLKDNREKIEKILTFRIPYYVGPLARGNSRFAWMTRKSEETITPWNFEEVVDKGASAQSFIERMTNFDKNLPNEKVLPKHSLLYEYFTVYNELTKVKYVTEGMRKPAFLSGEQKKAIVDLLFKTNRKVTVKQLKEDYFKKIECFDSVEISGVEDRFNASLGTYHDLLKIIKDKDFLDNEENEDILEDIVLTLTLFEDREMIEERLKTYAHLFDDKVMKQLKRRRYTGWGRLSRKLINGIRDKQSGKTILDFLKSDGFANRNFMQLIHDDSLTFKEDIQKAQVSGQGDSLHEHIANLAGSPAIKKGILQTVKVVDELVKVMGRHKPENIVIEMARENQTTQKGQKNSRERMKRIEEGIKELGSQILKEHPVENTQLQNEKLYLYYLQNGRDMYVDQELDINRLSDYDVDHIVPQSFLKDDSIDNKVLTRSDKNRGKSDNVPSEEVVKKMKNYWRQLLNAKLITQRKFDNLTKAERGGLSELDKAGFIKRQLVETRQITKHVAQILDSRMNTKYDENDKLIREVKVITLKSKLVSDFRKDFQFYKVREINNYHHAHDAYLNAVVGTALIKKYPKLESEFVYGDYKVYDVRKMIAKSEQEIGKATAKYFFYSNIMNFFKTEITLANGEIRKRPLIETNGETGEIVWDKGRDFATVRKVLSMPQVNIVKKTEVQTGGFSKESILPKRNSDKLIARKKDWDPKKYGGFDSPTVAYSVLVVAKVEKGKSKKLKSVKELLGITIMERSSFEKNPIDFLEAKGYKEVKKDLIIKLPKYSLFELENGRKRMLASAGELQKGNELALPSKYVNFLYLASHYEKLKGSPEDNEQKQLFVEQHKHYLDEIIEQISEFSKRVILADANLDKVLSAYNKHRDKPIREQAENIIHLFTLTNLGAPAAFKYFDTTIDRKRYTSTKEVLDATLIHQSITGLYETRIDLSQLGGDGSPKKKRKVSSDYKDHDGDYKDHDIDYKDDDDKAAG

SEQ ID NO: 332 - DNA, 4107 bp, Streptococcus pyogenes
atggataagaaatactcaataggcttagatatcggcacaaatagcgtcggatgggcggtgatcactgatgaatataaggttccgtctaaaaagttcaaggttctgggaaatacagaccgccacagtatcaaaaaaaatcttataggggctcttttatttgacagtggagagacagcggaagcgactcgtctcaaacggacagctcgtagaaggtatacacgtcggaagaatcgtatttgttatctacaggagattttttcaaatgagatggcgaaagtagatgatagtttctttcatcgacttgaagagtcttttttggtggaagaagacaagaagcatgaacgtcatcctatttttggaaatatagtagatgaagttgcttatcatgagaaatatccaactatctatcatctgcgaaaaaaattggtagattctactgataaagcggatttgcgcttaatctatttggccttagcgcatatgattaagtttcgtggtcattttttgattgagggagatttaaatcctgataatagtgatgtggacaaactatttatccagttggtacaaacctacaatcaattatttgaagaaaaccctattaacgcaagtggagtagatgctaaagcgattctttctgcacgattgagtaaatcaagacgattagaaaatctcattgctcagctccccggtgagaagaaaaatggcttatttgggaatctcattgctttgtcattgggtttgacccctaattttaaatcaaattttgatttggcagaagatgctaaattacagctttcaaaagatacttacgatgatgatttagataatttattggcgcaaattggagatcaatatgctgatttgtttttggcagctaagaatttatcagatgctattttactttcagatatcctaagagtaaatactgaaataactaaggctcccctatcagcttcaatgattaaacgctacgatgaacatcatcaagacttgactcttttaaaagctttagttcgacaacaacttccagaaaagtataaagaaatcttttttgatcaatcaaaaaacggatatgcaggttatattgatgggggagctagccaagaagaattttataaatttatcaaaccaattttagaaaaaatggatggtactgaggaattattggtgaaactaaatcgtgaagatttgctgcgcaagcaacggacctttgacaacggctctattccccatcaaattcacttgggtgagctgcatgctattttgagaagacaagaagacttttatccatttttaaaagacaatcgtgagaagattgaaaaaatcttgacttttcgaattccttattatgttggtccattggcgcgtggcaatagtcgttttgcatggatgactcggaagtctgaagaaacaattaccccatggaattttgaagaagttgtcgataaaggtgcttcagctcaatcatttattgaacgcatgacaaactttgataaaaatcttccaaatgaaaaagtactaccaaaacatagtttgctttatgagtattttacggtttataacgaattgacaaaggtcaaatatgttactgaaggaatgcgaaaaccagcatttctttcaggtgaacagaagaaagccattgttgatttactcttcaaaacaaatcgaaaagtaaccgttaagcaattaaaagaagattatttcaaaaaaatagaatgttttgatagtgttgaaatttcaggagttgaagatagatttaatgcttcattaggtacctaccatgatttgctaaaaattattaaagataaagattttttggataatgaagaaaatgaagatatcttagaggatattgttttaacattgaccttatttgaagatagggagatgattgaggaaagacttaaaacatatgctcacctctttgatgataaggtgatgaaacagcttaaacgtcgccgttatactggttggggacgtttgtctcgaaaattgattaatggtattagggataagcaatctggcaaaacaatattagattttttgaaatcagatggttttgccaatcgcaattttatgcagctgatccatgatgatagtttgacatttaaagaagacattcaaaaagcacaagtgtctggacaaggcgatagtttacatgaacatattgcaaatttagctggtagccctgctattaaaaaaggtattttacagactgtaaaagttgttgatgaattggtcaaagtaatggggcggcataagccagaaaatatcgttattgaaatggcacgtgaaaatcagacaactcaaaagggccagaaaaattcgcgagagcgtatgaaacgaatcgaagaaggtatcaaagaattaggaagtcagattcttaaagagcatcctgttgaaaatactcaattgcaaaatgaaaagctctatctctattatctccaaaatggaagagacatgtatgtggaccaagaattagatattaatcgtttaagtgattatgatgtcgatcacattgttccacaaagtttccttaaagacgattcaatagacaataaggtcttaacgcgttctgataaaaatcgtggtaaatcggataacgttccaagtgaagaagtagtcaaaaagatgaaaaactattggagacaacttctaaacgccaagttaatcactcaacgtaagtttgataatttaacgaaagctgaacgtggaggtttgagtgaacttgataaagctggttttatcaaacgccaattggttgaaactcgccaaatcactaagcatgtggcacaaattttggatagtcgcatgaatactaaatacgatgaaaatgataaacttattcgagaggttaaagtgattaccttaaaatctaaattagtttctgacttccgaaaagatttccaattctataaagtacgtgagattaacaattaccatcatgcccatgatgcgtatctaaatgccgtcgttggaactgctttgattaagaaatatccaaaacttgaatcggagtttgtctatggtgattataaagtttatgatgttcgtaaaatgattgctaagtctgagcaagaaataggcaaagcaaccgcaaaatatttcttttactctaatatcatgaacttcttcaaaacagaaattacacttgcaaatggagagattcgcaaacgccctctaatcgaaactaatggggaaactggagaaattgtctgggataaagggcgagattttgccacagtgcgcaaagtattgtccatgccccaagtcaatattgtcaagaaaacagaagtacagacaggcggattctccaaggagtcaattttaccaaaaagaaattcggacaagcttattgctcgtaaaaaagactgggatccaaaaaaatatggtggttttgatagtccaacggtagcttattcagtcctagtggttgctaaggtggaaaaagggaaatcgaagaagttaaaatccgttaaagagttactagggatcacaattatggaaagaagttcctttgaaaaaaatccgattgactttttagaagctaaaggatataaggaagttaaaaaagacttaatcattaaactacctaaatatagtctttttgagttagaaaacggtcgtaaacggatgctggctagtgccggagaattacaaaaaggaaatgagctggctctgccaagcaaatatgtgaattttttatatttagctagtcattatgaaaagttgaagggtagtccagaagataacgaacaaaaacaattgtttgtggagcagcataagcattatttagatgagattattgagcaaatcagtgaattttctaagcgtgttattttagcagatgccaatttagataaagttcttagtgcatataacaaacatagagacaaaccaatacgtgaacaagcagaaaatattattcatttatttacgttgacgaatcttggagctcccgctgcttttaaatattttgatacaacaattgatcgtaaacgatatacgtctacaaaagaagttttagatgccactcttatccatcaatccatcactggtctttatgaaacacgcattgatttgagtcagctaggaggtgactga

SEQ ID NO: 333 - DNA, 125 bp, Artificial Sequence
  Synthetic
  misc_feature (1)..(8): n is a, c, g, or t
nnnnnnnngtttttgtactctcaagatttagaaataaatcttgcagaagctacaaagataaggcttcatgccgaaatcaacaccctgtcattttatggcagggtgttttcgttatttaatttttt

SEQ ID NO: 334 - DNA, 121 bp, Artificial Sequence
  Synthetic
  misc_feature (1)..(18): n is a, c, g, or t
nnnnnnnnnnnnnnnnnngtttttgtactctcagaaatgcagaagctacaaagataaggcttcatgccgaaatcaacaccctgtcattttatggcagggtgttttcgttatttaatttttt

SEQ ID NO: 335 - DNA, 109 bp, Artificial Sequence
  Synthetic
  misc_feature (1)..(20): n is a, c, g, or t
nnnnnnnnnnnnnnnnnnnngtttttgtactctcagaaatgcagaagctacaaagataaggcttcatgccgaaatcaacaccctgtcattttatggcagggtgtttttt

SEQ ID NO: 336 - DNA, 102 bp, Artificial Sequence
  Synthetic
  misc_feature (1)..(20): n is a, c, g, or t
nnnnnnnnnnnnnnnnnnnngttttagagctagaaatagcaagttaaaataaggctagtccgttatcaacttgaaaaagtggcaccgagtcggtgctttttt

SEQ ID NO: 337 - DNA, 87 bp, Artificial Sequence
  Synthetic
  misc_feature (1)..(19): n is a, c, g, or t
nnnnnnnnnnnnnnnnnnngttttagagctagaaatagcaagttaaaataaggctagtccgttatcaacttgaaaaagtgttttttt

SEQ ID NO: 338 - DNA, 76 bp, Artificial Sequence
  Synthetic
  misc_feature (1)..(20): n is a, c, g, or t
nnnnnnnnnnnnnnnnnnnngttttagagctagaaatagcaagttaaaataaggctagtccgttatcatttttttt

SEQ ID NO: 339 - RNA, 81 nt, Artificial Sequence
  Synthetic
guuuuagagcuagaaauagcaaguuaaaauaaggcuaguccguuaucaacuugaaaaaguggcaccgagucggugcuuuuu

SEQ ID NO: 340 - protein, 1 aa, Artificial Sequence
  Synthetic
  misc_feature (1)..(1): Xaa can be any naturally occurring amino acid
X

SEQ ID NO: 341 - protein, 1 aa, Artificial Sequence
  Synthetic
  misc_feature (1)..(1): Xaa can be any naturally occurring amino acid
X

SEQ ID NO: 342 - protein, 1 aa, Artificial Sequence
  Synthetic
  misc_feature (1)..(1): Xaa can be any naturally occurring amino acid
X

SEQ ID NO: 343 - DNA, 23 bp, Artificial Sequence
  Synthetic
cagagcactggaattcgtcaggg

SEQ ID NO: 344 - protein, 1 aa, Artificial Sequence
  Synthetic
  misc_feature (1)..(1): Xaa can be any naturally occurring amino acid
X

SEQ ID NO: 345 - protein, 1378 aa, Lactobacillus fermentum
MKEYHIGLDIGTSSIGWAVTDSQFKLMRIKGKTAIGVRLFEEGKTAAERRTFRTTRRRLKRRKWRLHYLDEIFAPHLQEVDENFLRRLKQSNIHPEDPTKNQAFIGKLLFPDLLKKNERGYPTLIKMRDELPVEQRAHYPVMNIYKLREAMINEDRQFDLREVYLAVHHIVKYRGHFLNNASVDKFKVGRIDFDKSFNVLNEAYEELQNGEGSFTIEPSKVEKIGQLLLDTKMRKLDRQKAVAKLLEVKVADKEETKRNKQIATAMSKLVLGYKADFATVAMANGNEWKIDLSSETSEDEIEKFREELSDAQNDILTEITSLFSQIMLNEIVPNGMSISESMMDRYWTHERQLAEVKEYLATQPASARKEFDQVYNKYIGQAPKERGFDLEKGLKKILSKKENWKEIDELLKAGDFLPKQRTSANGVIPHQMHQQELDRIIEKQAKYYPWLATENPATGERDRHQAKYELDQLVSFRIPYYVGPLVTPEVQKATSGAKFAWAKRKEDGEITPWNLWDKIDRAESAEAFIKRMTVKDTYLLNEDVLPANSLLYQKYNVLNELNNVRVNGRRLSVGIKQDIYTELFKKKKTVKASDVASLVMAKTRGVNKPSVEGLSDPKKFNSNLATYLDLKSIVGDKVDDNRYQTDLENIIEWRSVFEDGEIFADKLTEVEWLTDEQRSALVKKRYKGWGRLSKKLLTGIVDENGQRIIDLMWNTDQNFKEIVDQPVFKEQIDQLNQKAITNDGMTLRERVESVLDDAYTSPQNKKAIWQVVRVVEDIVKAVGNAPKSISIEFARNEGNKGEITRSRRTQLQKLFEDQAHELVKDTSLTEELEKAPDLSDRYYFYFTQGGKDMYTGDPINFDEISTKYDIDHILPQSFVKDNSLDNRVLTSRKENNKKSDQVPAKLYAAKMKPYWNQLLKQGLITQRKFENLTKDVDQNIKYRSLGFVKRQLVETRQVIKLTANILGSMYQEAGTEIIETRAGLTKQLREEFDLPKVREVNDYHHAVDAYLTTFAGQYLNRRYPKLRSFFVYGEYMKFKHGSDLKLRNFNFFHELMEGDKSQGKVVDQQTGELITTRDEVAKSFDRLLNMKYMLVSKEVHDRSDQLYGATIVTAKESGKLTSPIEIKKNRLVDLYGAYTNGTSAFMTIIKFTGNKPKYKVIGIPTTSAASLKRAGKPGSESYNQELHRIIKSNPKVKKGFEIVVPHVSYGQLIVDGDCKFTLASPTVQHPATQLVLSKKSLETISSGYKILKDKPAIANERLIRVFDEVVGQMNRYFTIFDQRSNRQKVADARDKFLSLPTESKYEGAKKVQVGKTEVITNLLMGLHANATQGDLKVLGLATFGFFQSTTGLSLSEDTMIVYQSPTGLFERRICLKDI

SEQ ID NO: 346 - protein, 1368 aa, Staphylococcus aureus [sequence omitted]

SEQ ID NO: 347 - protein, 1053 aa, Staphylococcus aureus
MGKRNYILGLDIGITSVGYGIIDYETRDVIDAGVRLFKEANVENNEGRRSKRGARRLKRRRRHRIQRVKKLLFDYNLLTDHSELSGINPYEARVKGLSQKLSEEEFSAALLHLAKRRGVHNVNEVEEDTGNELSTKEQISRNSKALEEKYVAELQLERLKKDGEVRGSINRFKTSDYVKEAKQLLKVQKAYHQLDQSFIDTYIDLLETRRTYYEGPGEGSPFGWKDIKEWYEMLMGHCTYFPEELRSVKYAYNADLYNALNDLNNLVITRDENEKLEYYEKFQIIENVFKQKKKPTLKQIAKEILVNEEDIKGYRVTSTGKPEFTNLKVYHDIKDITARKEIIENAELLDQIAKILTIYQSSEDIQEELTNLNSELTQEEIEQISNLKGYTGTHNLSLKAINLILDELWHTNDNQIAIFNRLKLVPKKVDLSQQKEIPTTLVDDFILSPVVKRSFIQSIKVINAIIKKYGLPNDIIIELAREKNSKDAQKMINEMQKRNRQTNERIEEIIRTTGKENAKYLIEKIKLHDMQEGKCLYSLEAIPLEDLLNNPFNYEVDHIIPRSVSFDNSFNNKVLVKQEENSKKGNRTPFQYLSSSDSKISYETFKKHILNLAKGKGRISKTKKEYLLEERDINRFSVQKDFINRNLVDTRYATRGLMNLLRSYFRVNNLDVKVKSINGGFTSFLRRKWKFKKERNKGYKHHAEDALIIANADFIFKEWKKLDKAKKVMENQMFEEKQAESMPEIETEQEYKEIFITPHQIKHIKDFKDYKYSHRVDKKPNRKLINDTLYSTRKDDKGNTLIVNNLNGLYDKDNDKLKKLINKSPEKLLMYHHDPQTYQKLKLIMEQYGDEKNPLYKYYEETGNYLTKYSKKDNGPVIKKIKYYGNKLNAHLDITDDYPNSRNKVVKLSLKPYRFDVYLDNGVYKFVTVKNLDVIKKENYYEVNSKCYEEAKKLKKISNQAEFIASFYKNDLIKINGELYRVIGVNNDLLNRIEVNMIDITYREYLENMNDKRPPHIIKTIASKTQSIKKYSTDILGNLYEVKSKKHPQIIKK

SEQ ID NO: 348 - protein, 1409 aa, Streptococcus thermophilus
MLFNKCIIISINLDFSNKEKCMTKPYSIGLDIGTNSVGWAVITDNYKVPSKKMKVLGNTSKKYIKKNLLGVLLFDSGITAEGRRLKRTARRRYTRRRNRILYLQEIFSTEMATLDDAFFQRLDDSFLVPDDKRDSKYPIFGNLVEEKVYHDEFPTIYHLRKYLADSTKKADLRLVYLALAHMIKYRGHFLIEGEFNSKNNDIQKNFQDFLDTYNAIFESDLSLENSKQLEEIVKDKISKLEKKDRILKLFPGEKNSGIFSEFLKLIVGNQADFRKCFNLDEKASLHFSKESYDEDLETLLGYIGDDYSDVFLKAKKLYDAILLSGFLTVTDNETEAPLSSAMIKRYNEHKEDLALLKEYIRNISLKTYNEVFKDDTKNGYAGYIDGKTNQEDFYVYLKNLLAEFEGADYFLEKIDREDFLRKQRTFDNGSIPYQIHLQEMRAILDKQAKFYPFLAKNKERIEKILTFRIPYYVGPLARGNSDFAWSIRKRNEKITPWNFEDVIDKESSAEAFINRMTSFDLYLPEEKVLPKHSLLYETFNVYNELTKVRFIAESMRDYQFLDSKQKKDIVRLYFKDKRKVTDKDIIEYLHAIYGYDGIELKGIEKQFNSSLSTYHDLLNIINDKEFLDDSSNEAIIEEIIHTLTIFEDREMIKQRLSKFENIFDKSVLKKLSRRHYTGWGKLSAKLINGIRDEKSGNTILDYLIDDGISNRNFMQLIHDDALSFKKKIQKAQIIGDEDKGNIKEVVKSLPGSPAIKKGILQSIKIVDELVKVMGGRKPESIVVEMARENQYTNQGKSNSQQRLKRLEKSLKELGSKILKENIPAKLSKIDNNALQNDRLYLYYLQNGKDMYTGDDLDIDRLSNYDIDHIIPQAFLKDNSIDNKVLVSSASNRGKSDDFPSLEVVKKRKTFWYQLLKSKLISQRKFDNLTKAERGGLLPEDKAGFIQRQLVETRQITKHVARLLDEKFNNKKDENNRAVRTVKIITLKSTLVSQFRKDFELYKVREINDFHHAHDAYLNAVIASALLKKYPKLEPEFVYGDYPKYNSFRERKSATEKVYFYSNIMNIFKKSISLADGRVIERPLIEVNEETGESVWNKESDLATVRRVLSYPQVNVVKKVEEQNHGLDRGKPKGLFNANLSSKPKPNSNENLVGAKEYLDPKKYGGYAGISNSFAVLVKGTIEKGAKKKITNVLEFQGISILDRINYRKDKLNFLLEKGYKDIELIIELPKYSLFELSDGSRRMLASILSTNNKRGEIHKGNQIFLSQKFVKLLYHAKRISNTINENHRKYVENHKKEFEELFYYILEFNENYVGAKKNGKLLNSAFQSWQNHSIDELCSSFIGPTGSERKGLFELTSRGSAADFEFLGVKIPRYRDYTPSSLLKDATLIHQSVTGLYETRIDLAKLGEG

SEQ ID NO: 349 - protein, 1402 aa, Lactobacillus crispatus
MKIKNYNLALTPSTSAVGHVEVDDDLNILEPVHHQKAIGVAKFGEGETAEARRLARSARRTTKRRANRINHYFNEIMKPEIDKVDPLMFDRIKQAGLSPLDERKEFRTVIFDRPNIASYYHNQFPTIWHLQKYLMITDEKADIRLIYWALHSLLKHRGHFFNTTPMSQFKPGKLNLKDDMLALDDYNDLEGLSFAVANSPEIEKVIKDRSMHKKEKIAELKKLIVNDVPDKDLAKRNNKIITQIVNAIMGNSFHLNFIFDMDLDKLTSKAWSFKLDDPELDTKFDAISGSMTDNQIGIFETLQKIYSAISLLDILNGSSNVVDAKNALYDKHKRDLNLYFKFLNTLPDEIAKTLKAGYTLYIGNRKKDLLAARKLLKVNVAKNFSQDDFYKLINKELKSIDKQGLQTRFSEKVGELVAQNNFLPVQRSSDNVFIPYQLNAITFNKILENQGKYYDFLVKPNPAKKDRKNAPYELSQLMQFTIPYYVGPLVTPEEQVKSGIPKTSRFAWMVRKDNGAITPWNFYDKVDIEATADKFIKRSIAKDSYLLSELVLPKHSLLYEKYEVFNELSNVSLDGKKLSGGVKQILFNEVFKKTNKVNTSRILKALAKHNIPGSKITGLSNPEEFTSSLQTYNAWKKYFPNQIDNFAYQQDLEKMIEWSTVFEDHKILAKKLDEIEWLDDDQKKFVANTRLRGWGRLSKRLLTGLKDNYGKSIMQRLETTKANFQQIVYKPEFREQIDKISQAAAKNQSLEDILANSYTSPSNRKAIRKTMSVVDEYIKLNHGKEPDKIFLMFQRSEQEKGKQTEARSKQLNRILSQLKADKSANKLFSKQLADEFSNAIKKSKYKLNDKQYFYFQQLGRDALTGEVIDYDELYKYTVLHIIPRSKLTDDSQNNKVLTKYKIVDGSVALKFGNSYSDALGMPIKAFWTELNRLKLIPKGKLLNLTTDFSTLNKYQRDGYIARQLVETQQIVKLLATIMQSRFKHTKIIEVRNSQVANIRYQFDYFRIKNLNEYYRGFDAYLAAVVGTYLYKVYPKARRLFVYGQYLKPKKTNQENQDMHLDSEKKSQGFNFLWNLLYGKQDQIFVNGTDVIAFNRKDLITKMNTVYNYKSQKISLAIDYHNGAMFKATLFPRNDRDTAKTRKLIPKKKDYDTDIYGGYTSNVDGYMLLAEIIKRDGNKQYGFYGVPSRLVSELDTLKKTRYTEYEEKLKEIIKPELGVDLKKIKKIKILKNKVPFNQVIIDKGSKFFITSTSYRWNYRQLILSAESQQTLMDLVVDPDFSNHKARKDARKNADERLIKVYEEILYQVKNYMPMFVELHRCYEKLVDAQKTFKSLKISDKAMVLNQILILLHSNATSPVLEKLGYHTRFTLGKKHNLISENAVLVTQSITGLKENHVSIKQML

SEQ ID NO: 350 - protein, 1385 aa, Pedicoccus damnosus
MTNEKYSIGLDIGTSSIGFAVVNDNNRVIRVKGKNAIGVRLFDEGKAAADRRSFRTTRRSFRTTRRRLSRRRWRLKLLREIFDAYITPVDEAFFIRLKESNLSPKDSKKQYSGDILFNDRSDKDFYEKYPTIYHLRNALMTEHRKFDVREIYLAIHHIMKFRGHFLNATPANNFKVGRLNLEEKFEELNDIYQRVFPDESIEFRTDNLEQIKEVLLDNKRSRADRQRTLVSDIYQSSEDKDIEKRNKAVATEILKASLGNKAKLNVITNVEVDKEAAKEWSITFDSESIDDDLAKIEGQMTDDGHEIIEVLRSLYSGITLSAIVPENHTLSQSMVAKYDLHKDHLKLFKKLINGMTDTKKAKNLRAAYDGYIDGVKGKVLPQEDFYKQVQVNLDDSAEANEIQTYIDQDIFMPKQRTKANGSIPHQLQQQELDQIIENQKAYYPWLAELNPNPDKKRQQLAKYKLDELVTFRVPYYVGPMITAKDQKNQSGAEFAWMIRKEPGNITPWNFDQKVDRMATANQFIKRMTTTDTYLLGEDVLPAQSLLYQKFEVLNELNKIRIDHKPISIEQKQQIFNDLFKQFKNVTIKHLQDYLVSQGQYSKRPLIEGLADEKRFNSSLSTYSDLCGIFGAKLVEENDRQEDLEKIIEWSTIFEDKKIYRAKLNDLTWLTDDQKEKLATKRYQGWGRLSRKLLVGLKNSEHRNIMDILWITNENFMQIQAEPDFAKLVTDANKGMLEKTDSQDVINDLYTSPQNKKAIRQILLVVHDIQNAMHGQAPAKIHVEFARGEERNPRRSVQRQRQVEAAYEKVSNELVSAKVRQEFKEAINNKRDFKDRLFLYFMQGGIDIYTGKQLNIDQLSSYQIDHILPQAFVKDDSLTNRVLTNENQVKADSVPIDIFGKKMLSVWGRMKDQGLISKGKYRNLTMNPENISAHTENGFINRQLVETRQVIKLAVNILADEYGDSTQIISVKADLSHQMREDFELLKNRDVNDYHHAFDAYLAAFIGNYLLKRYPKLESYFVYGDFKKFTQKETKMRRFNFIYDLKHCDQVVNKETGEILWTKDEDIKYIRHLFAYKKILVSHEVREKRGALYNQTIYKAKDDKGSGQESKKLIRIKDDKETKIYGGYSGKSLAYMTIVQITKKNKVSYRVIGIPTLALARLNKLENDSTENNGELYKIIKPQFTHYKVDKKNGEIIETTDDFKIVVSKVRFQQLIDDAGQFFMLASDTYKNNAQQLVISNNALKAINNTNITDCPRDDLERLDNLRLDSAFDEIVKKMDKYFSAYDANNFREKIRNSNLIFYQLPVEDQWENNKITELGKRTVLTRILQGLHANATTTDMSIFKIKTPFGQLRQRSGISLSENAQLIYQSPTGLFERRVQLNKIK

SEQ ID NO: 351 - protein, 1367 aa, Fusobacterium nucleatum
MKKQKFSDYYLGFDIGTNSVGWCVTDLDYNVLRFNKKDMWGSRLFEEAKTAAERRVQRNSRRRLKRRKWRLNLLEEIFSNEILKIDSNFFRRLKESSLWLEDKSSKEKFTLFNDDNYKDYDFYKQYPTIFHLRNELIKNPEKKDIRLVYLAIHSIFKSRGHFLFEGQNLKEIKNFETLYNNLIAFLEDNGINKIIDKNNIEKLEKIVCDSKKGLKDKEKEFKEIFNSDKQLVAIFKLSVGSSVSLNDLFDTDEYKKGEVEKEKISFREQIYEDDKPIYYSILGEKIELLDIAKTFYDFMVLNNILADSQYISEAKVKLYEEHKKDLKNLKYIIRKYNKGNYDKLFKDKNENNYSAYIGLNKEKSKKEVIEKSRLKIDDLIKNIKGYLPKVEEIEEKDKAIFNKILNKIELKTILPKQRISDNGTLPYQIHEAELEKILENQSKYYDFLNYEENGIITKDKLLMTFKFRIPYYVGPLNSYHKDKGGNSWIVRKEEGKILPWNFEQKVDIEKSAEEFIKRMTNKCTYLNGEDVIPKDTFLYSEYVILNELNKVQVNDEFLNEENKRKIIDELFKENKKVSEKKFKEYLLVKQIVDGTIELKGVKDSFNSNYISYIRFKDIFGEKLNLDIYKEISEKSILWKCLYGDDKKIFEKKIKNEYGDILTKDEIKKINTFKFNNWGRLSEKLLTGIEFINLETGECYSSVMDALRRTNYNLMELLSSKFTLQESINNENKEMNEASYRDLIEESYVSPSLKRAIFQTLKIYEEIRKITGRVPKKVFIEMARGGDESMKNKKIPARQEQLKKLYDSCGNDIANFSIDIKEMKNSLISYDNNSLRQKKLYLYYLQFGKCMYTGREIDLDRLLQNNDTYDIDHIYPRSKVIKDDSFDNLVLVLKNENAEKSNEYPVKKEIQEKMKSFWRFLKEKNFISDEKYKRLTGKDDFELRGFMARQLVNVRQTTKEVGKILQQIEPEIKIVYSKAEIASSFREMFDFIKVRELNDTHHAKDAYLNIVAGNVYNTKFTEKPYRYLQEIKENYDVKKIYNYDIKNAWDKENSLEIVKKNMEKNTVNITRFIKEKKGQLFDLNPIKKGETSNEIISIKPKVYNGKDDKLNEKYGYYKSLNPAYFLYVEHKEKNKRIKSFERVNLVDVNNIKDEKSLVKYLIENKKLVEPRVIKKVYKRQVILINDYPYSIVTLDSNKLMDFENLKPLFLENKYEKILKNVIKFLEDNQGKSEENYKFIYLKKKDRYEKNETLESVKDRYNLEFNEMYDKFLEKLDSKDYKNYMNNKKYQELLDVKEKFIKLNLFDKAFTLKSFLDLFNRKTMADFSKVGLTKYLGKIQKISSNVLSKNELYLLEESVTGLFVKKIKL

SEQ ID NO: 352 - protein, 1286 aa, Enterococcus cecorum
RRKQRIQILQELLGEEVLKTDPGFFHRMKESRYVVEDKRTLDGKQVELPYALFVDKDYTDKEYYKQFPTINHLIVYLMTTSDTPDIRLVYLALHYYMKNRGNFLHSGDINNVKDINDILEQLDNVLETFLDGWNLKLKSYVEDIKNIYNRDLGRGERKKAFVNTLGAKTKAEKAFCSLISGGSTNLAELFDDSSLKEIETPKIEFASSSLEDKIDGIQEALEDRFAVIEAAKRLYDWKTLTDILGDSSSLAEARVNSYQMHHEQLLELKSLVKEYLDRKVFQEVFVSLNVANNYPAYIGHTKINGKKKELEVKRTKRNDFYSYVKKQVIEPIKKKVSDEAVLTKLSEIESLIEVDKYLPLQVNSDNGVIPYQVKLNELTRIFDNLENRIPVLRENRDKIIKTFKFRIPYYVGSLNGVVKNGKCTNWMVRKEEGKIYPWNFEDKVDLEASAEQFIRRMTNKCTYLVNEDVLPKYSLLYSKYLVLSELNNLRIDGRPLDVKIKQDIYENVFKKNRKVTLKKIKKYLLKEGIITDDDELSGLADDVKSSLTAYRDFKEKLGHLDLSEAQMENIILNITLFGDDKKLLKKRLAALYPFIDDKSLNRIATLNYRDWGRLSERFLSGITSVDQETGELRTIIQCMYETQANLMQLLAEPYHFVEAIEKENPKVDLESISYRIVNDLYVSPAVKRQIWQTLLVIKDIKQVMKHDPERIFIEMAREKQESKKTKSRKQVLSEVYKKAKEYEHLFEKLNSLTEEQLRSKKIYLYFTQLGKCMYSGEPIDFENLVSANSNYDIDHIYPQSKTIDDSFNNIVLVKKSLNAYKSNHYPIDKNIRDNEKVKTLWNTLVSKGLITKEKYERLIRSTPFSDEELAGFIARQLVETRQSTKAVAEILSNWFPESEIVYSKAKNVSNFRQDFEILKVRELNDCHHAHDAYLNIVVGNAYHTKFTNSPYRFIKNKANQEYNLRKLLQKVNKIESNGVVAWVGQSENNPGTIATVKKVIRRNTVLISRMVKEVDGQLFDLTLMKKGKGQVPIKSSDERLTDISKYGGYNKATGAYFTFVKSKKRGKVVRSFEYVPLHLSKQFENNNELLKEYIEKDRGLTDVEILIPKVLINSLFRYNGSLVRITGRGDTRLLLVHEQPLYVSNSFVQQLKSVSSYKLKKSENDNAKLTKTATEKLSNIDELYDGLLRKLDLPIYSYWFSSIKEYLVESRTKYIKLSIEEKALVIFEILHLFQSDAQVPNLKILGLSTKPSRIRIQKNLKDTDKMSIIHQSPSGIFEHEIELTSL

SEQ ID NO: 353 - protein, 1312 aa, Anaerostipes hadrus
MQNGFLGITVSSEQVGWAVTNPKYELERASRKDLWGVRLFDKAETAEDRRMFRTNRRLNQRKKNRIHYLRDIFHEEVNQKDPNFFQQLDESNFCEDDRTVEFNFDTNLYKNQFPTVYHLRKYLMETKDKPDIRLVYLAFSKFMKNRGHFLYKGNLGEVMDFENSMKGFCESLEKFNIDFPTLSDEQVKEVRDILCDHKIAKTVKKKNIITITKVKSKTAKAWIGLFCGCSVPVKVLFQDIDEEIVTDPEKISFEDASYDDYIANIEKGVGIYYEAIVSAKMLFDWSILNEILGDHQLLSDAMIAEYNKHHDDLKRLQKIIKGTGSRELYQDIFINDVSGNYVCYVGHAKTMSSADQKQFYTFLKNRLKNVNGISSEDAEWIDTEIKNGTLLPKQTKRDNSVIPHQLQLREFELILDNMQEMYPFLKENREKLLKIFNFVIPYYVGPLKGVVRKGESTNWMVPKKDGVIHPWNFDEMVDKEASAECFISRMTGNCSYLFNEKVLPKNSLLYETFEVLNELNPLKINGEPISVELKQRIYEQLFLTGKKVTKKSLTKYLIKNGYDKDIELSGIDNEFHSNLKSHIDFEDYDNLSDEEVEQIILRITVFEDKQLLKDYLNREFVKLSEDERKQICSLSYKGWGNLSEMLLNGITVTDSNGVEVSVMDMLWNTNLNLMQILSKKYGYKAEIEHYNKEHEKTIYNREDLMDYLNIPPAQRRKVNQLITIVKSLKKTYGVPNKIFFKISREHQDDPKRTSSRKEQLKYLYKSLKSEDEKHLMKELDELNDHELSNDKVYLYFLQKGRCIYSGKKLNLSRLRKSNYQNDIDYIYPLSAVNDRSMNNKVLTGIQENRADKYTYFPVDSEIQKKMKGFWMELVLQGFMTKEKYFRLSRENDFSKSELVSFIEREISDNQQSGRMIASVLQYYFPESKIVFVKEKLISSFKRDFHLISSYGHNHLQAAKDAYITIVVGNVYHTKFTMDPAIYFKNHKRKDYDLNRLFLENISRDGQIAWESGPYGSIQTVRKEYAQNHIAVTKRVVEVKGGLFKQMPLKKGHGEYPLKTNDPRFGNIAQYGGYTNVTGSYFVLVESMEKGKKRISLEYVPVYLHERLEDDPGHKLLKEYLVDHRKLNHPKILLAKVRKNSLLKIDGFYYRLNGRSGNALILTNAVELIMDDWQTKTANKISGYMKRRAIDKKARVYQNEFHIQELEQLYDFYLDKLKNGVYKNRKNNQAELIHNEKEQFMELKTEDQCVLLTEIKKLFVCSPMQADLTLIGGSKHTGMIAMSSNVTKADFAVIAEDPLGLRNKVIYSHKGEK

SEQ ID NO: 354 - protein, 1344 aa, Enterococcus faecalis
MSQNNNKIYNIGLDIGDASVGWAVVDEHYNLLKRHGKHMWGSRLFTQANTAVERRSSRSTRRRYNKRRERIRLLREIMEDMVLDVDPTFFIRLANVSFLDQEDKKDYLKENYHSNYNLFIDKDFNDKTYYDKYPTIYHLRKHLCESKEKEDPRLIYLALHHIVKYRGNFLYEGQKFSMDVSNIEDKMIDVLRQFNEINLFEYVEDRKKIDEVLNVLKEPLSKKHKAEKAFALFDTTKDNKAAYKELCAALAGNKFNVTKMLKEAELHDEDEKDISFKFSDATFDDAFVEKQPLLGDCVEFIDLLHDIYSWVELQNILGSAHTSEPSISAAMIQRYEDHKNDLKLLKDVIRKYLPKKYFEVFRDEKSKKNNYCNYINHPSKTPVDEFYKYIKKLIEKIDDPDVKTILNKIELESFMLKQNSRTNGAVPYQMQLDELNKILENQSVYYSDLKDNEDKIRSILTFRIPYYFGPLNITKDRQFDWIIKKEGKENERILPWNANEIVDVDKTADEFIKRMRNFCTYFPDEPVMAKNSLTVSKYEVLNEINKLRINDHLIKRDMKDKMLHTLFMDHKSISANAMKKWLVKNQYFSNTDDIKIEGFQKENACSTSLTPWIDFTKIFGKINESNYDFIEKIIYDVTVFEDKKILRRRLKKEYDLDEEKIKKILKLKYSGWSRLSKKLLSGIKTKYKDSTRTPETVLEVMERTNMNLMQVINDEKLGFKKTIDDANSTSVSGKFSYAEVQELAGSPAIKRGIWQALLIVDEIKKIMKHEPAHVYIEFARNEDEKERKDSFVNQMLKLYKDYDFEDETEKEANKHLKGEDAKSKIRSERLKLYYTQMGKCMYTGKSLDIDRLDTYQVDHIVPQSLLKDDSIDNKVLVLSSENQRKLDDLVIPSSIRNKMYGFWEKLFNNKIISPKKFYSLIKTEFNEKDQERFINRQIVETRQITKHVAQIIDNHYENTKVVTVRADLSHQFRERYHIYKNRDINDFHHAHDAYIATILGTYIGHRFESLDAKYIYGEYKRIFRNQKNKGKEMKKNNDGFILNSMRNIYADKDTGEIVWDPNYIDRIKKCFYYKDCFVTKKLEENNGTFFNVTVLPNDTNSDKDNTLATVPVNKYRSNVNKYGGFSGVNSFIVAIKGKKKKGKKVIEVNKLTGIPLMYKNADEEIKINYLKQAEDLEEVQIGKEILKNQLIEKDGGLYYIVAPTEIINAKQLILNESQTKLVCEIYKAMKYKNYDNLDSEKIIDLYRLLINKMELYYPEYRKQLVKKFEDRYEQLKVISIEEKCNIIKQILATLHCNSSIGKIMYSDFKISTTIGRLNGRTISLDDISFIAESPTGMYSKKYKL

SEQ ID NO: 355 - protein, 1288 aa, Enterococcus faecalis
MRLFEEGHTAEDRRLKRTARRRISRRRNRLRYLQAFFEEAMTDLDENFFARLQESFLVPEDKKWHRHPIFAKLEDEVAYHETYPTIYHLRKKLADSSEQADLRLIYLALAHIVKYRGHFLIEGKLSTENTSVKDQFQQFMVIYNQTFVNGESRLVSAPLPESVLIEEELTEKASRTKKSEKVLQQFPQEKANGLFGQFLKLMVGNKADFKKVFGLEEEAKITYASESYEEDLEGILAKVGDEYSDVFLAAKNVYDAVELSTILADSDKKSHAKLSSSMIVRFTEHQEDLKKFKRFIRENCPDEYDNLFKNEQKDGYAGYIAHAGKVSQLKFYQYVKKIIQDIAGAEYFLEKIAQENFLRKQRTFDNGVIPHQIHLAELQAIIHRQAAYYPFLKENQEKIEQLVTFRIPYYVGPLSKGDASTFAWLKRQSEEPIRPWNLQETVDLDQSATAFIERMTNFDTYLPSEKVLPKHSLLYEKFMVFNELTKISYTDDRGIKANFSGKEKEKIFDYLFKTRRKVKKKDIIQFYRNEYNTEIVTLSGLEEDQFNASFSTYQDLLKCGLTRAELDHPDNAEKLEDIIKILTIFEDRQRIRTQLSTFKGQFSAEVLKKLERKHYTGWGRLSKKLINGIYDKESGKTILDYLVKDDGVSKHYNRNFMQLINDSQLSFKNAIQKAQSSEHEETLSETVNELAGSPAIKKGIYQSLKIVDELVAIMGYAPKRIVVEMARENQTTSTGKRRSIQRLKIVEKAMAEIGSNLLKEQPTTNEQLRDTRLFLYYMQNGKDMYTGDELSLHRLSHYDIDHIIPQSFMKDDSLDNLVLVGSTENRGKSDDVPSKEVVKDMKAYWEKLYAAGLISQRKFQRLTKGEQGGLTLEDKAHFIQRQLVETRQITKNVAGILDQRYNAKSKEKKVQIITLKASLTSQFRSIFGLYKVREVNDYHHGQDAYLNCVVATTLLKVYPNLAPEFVYGEYPKFQTFKENKATAKAIIYTNLLRFFTEDEPRFTKDGEILWSNSYLKTIKKELNYHQMNIVKKVEVQKGGFSKESIKPKGPSNKLIPVKNGLDPQKYGGFDSPVVAYTVLFTHEKGKKPLIKQEILGITIMEKTRFEQNPILFLEEKGFLRPRVLMKLPKYTLYEFPEGRRRLLASAKEAQKGNQMVLPEHLLTLLYHAKQCLLPNQSESLAYVEQHQPEFQEILERVVDFAEVHTLAKSKVQQIVKLFEANQTADVKEIAASFIQLMQFNAMGAPSTFKFFQKDIERARYTSIKEIFDATIIYQSPTGLYETRRKVVD

SEQ ID NO: 356 - protein, 1052 aa, Staphylococcus aureus
KRNYILGLDIGITSVGYGIIDYETRDVIDAGVRLFKEANVENNEGRRSKRGARRLKRRRRHRIQRVKKLLFDYNLLTDHSELSGINPYEARVKGLSQKLSEEEFSAALLHLAKRRGVHNVNEVEEDTGNELSTKEQISRNSKALEEKYVAELQLERLKKDGEVRGSINRFKTSDYVKEAKQLLKVQKAYHQLDQSFIDTYIDLLETRRTYYEGPGEGSPFGWKDIKEWYEMLMGHCTYFPEELRSVKYAYNADLYNALNDLNNLVITRDENEKLEYYEKFQIIENVFKQKKKPTLKQIAKEILVNEEDIKGYRVTSTGKPEFTNLKVYHDIKDITARKEIIENAELLDQIAKILTIYQSSEDIQEELTNLNSELTQEEIEQISNLKGYTGTHNLSLKAINLILDELWHTNDNQIAIFNRLKLVPKKVDLSQQKEIPTTLVDDFILSPVVKRSFIQSIKVINAIIKKYGLPNDIIIELAREKNSKDAQKMINEMQKRNRQTNERIEEIIRTTGKENAKYLIEKIKLHDMQEGKCLYSLEAIPLEDLLNNPFNYEVDHIIPRSVSFDNSFNNKVLVKQEENSKKGNRTPFQYLSSSDSKISYETFKKHILNLAKGKGRISKTKKEYLLEERDINRFSVQKDFINRNLVDTRYATRGLMNLLRSYFRVNNLDVKVKSINGGFTSFLRRKWKFKKERNKGYKHHAEDALIIANADFIFKEWKKLDKAKKVMENQMFEEKQAESMPEIETEQEYKEIFITPHQIKHIKDFKDYKYSHRVDKKPNRELINDTLYSTRKDDKGNTLIVNNLNGLYDKDNDKLKKLINKSPEKLLMYHHDPQTYQKLKLIMEQYGDEKNPLYKYYEETGNYLTKYSKKDNGPVIKKIKYYGNKLNAHLDITDDYPNSRNKVVKLSLKPYRFDVYLDNGVYKFVTVKNLDVIKKENYYEVNSKCYEEAKKLKKISNQAEFIASFYNNDLIKINGELYRVIGVNNDLLNRIEVNMIDITYREYLENMNDKRPPRIIKTIASKTQSIKKYSTDILGNLYEVKSKKHPQIIKKG

SEQ ID NO: 357 - protein, 1082 aa, Geobacillus thermodenitrificans
MKYKIGLDIGITSIGWAVINLDIPRIEDLGVRIFDRAENPKTGESLALPRRLARSARRRLRRRKHRLERIRRLFVREGILTKEELNKLFEKKHEIDVWQLRVEALDRKLNNDELARILLHLAKRRGFRSNRKSERTNKENSTMLKHIEENQSILSSYRTVAEMVVKDPKFSLHKRNKEDNYTNTVARDDLEREIKLIFAKQREYGNIVCTEAFEHEYISIWASQRPFASKDDIEKKVGFCTFEPKEKRAPKATYTFQSFTVWEHINKLRLVSPGGIRALTDDERRLIYKQAFHKNKITFHDVRTLLNLPDDTRFKGLLYDRNTTLKENEKVRFLELGAYHKIRKAIDSVYGKGAAKSFRPIDFDTFGYALTMFKDDTDIRSYLRNEYEQNGKRMENLADKVYDEELIEELLNLSFSKFGHLSLKALRNILPYMEQGEVYSTACERAGYTFTGPKKKQKTVLLPNIPPIANPVVMRALTQARKVVNAIIKKYGSPVSIHIELARELSQSFDERRKMQKEQEGNRKKNETAIRQLVEYGLTLNPTGLDIVKFKLWSEQNGKCAYSLQPIEIERLLEPGYTEVDHVIPYSRSLDDSYTNKVLVLTKENREKGNRTPAEYLGLGSERWQQFETFVLTNKQFSKKKRDRLLRLHYDENEENEFKNRNLNDTRYISRFLANFIREHLKFADSDDKQKVYTVNGRITAHLRSRWNFNKNREESNLHHAVDAAIVACTTPSDIARVTAFYQRREQNKELSKKTDPQFPQPWPHFADELQARLSKNPKESIKALNLGNYDNEKLESLQPVFVSRMPKRSITGAAHQETLRRYIGIDERSGKIQTVVKKKLSEIQLDKTGHFPMYGKESDPRTYEAIRQRLLEHNNDPKKAFQEPLYKPKKNGELGPIIRTIKIIDTTNQVIPLNDGKTVAYNSNIVRVDVFEKDGKYYCVPIYTIDMMKGILPNKAIEPNKPYSEWKEMTEDYTFRFSLYPNDLIRIEFPREKTIKTAVGEEIKIKDLFAYYQTIDSSNGGLSLVSHDNNFSLRSIGSRTLKRFEKYQVDVLGNIYKVRGEKRVGVASSSHSKAGETIRPL

SEQ ID NO: 358 - protein, 1375 aa, S. canis
MEKKYSIGLDIGTNSVGWAVITDDYKVPSKKFKVLGNTNRKSIKKNLMGALLFDSGETAEATRLKRTARRRYTRRKNRIRYLQEIFANEMAKLDDSFFQRLEESFLVEEDKKNERHPIFGNLADEVAYHRNYPTIYHLRKKLADSPEKADLRLIYLALAHIIKFRGHFLIEGKLNAENSDVAKLFYQLIQTYNQLFEESPLDEIEVDAKGILSARLSKSKRLEKLIAVFPNEKKNGLFGNIIALALGLTPNFKSNFDLTEDAKLQLSKDTYDDDLDELLGQIGDQYADLFSAAKNLSDAILLSDILRSNSEVTKAPLSASMVKRYDEHHQDLALLKTLVRQQFPEKYAEIFKDDTKNGYAGYVGIGIKHRKRTTKLATQEEFYKFIKPILEKMDGAEELLAKLNRDDLLRKQRTFDNGSIPHQIHLKELHAILRRQEEFYPFLKENREKIEKILTFRIPYYVGPLARGNSRFAWLTRKSEEAITPWNFEEVVDKGASAQSFIERMTNFDEQLPNKKVLPKHSLLYEYFTVYNELTKVKYVTERMRKPEFLSGEQKKAIVDLLFKTNRKVTVKQLKEDYFKKIECFDSVEIIGVEDRFNASLGTYHDLLKIIKDKDFLDNEENEDILEDIVLTLTLFEDREMIEERLKTYAHLFDDKVMKQLKRRHYTGWGRLSRKMINGIRDKQSGKTILDFLKSDGFSNRNFMQLIHDDSLTFKEEIEKAQVSGQGDSLHEQIADLAGSPAIKKGILQTVKIVDELVKVMGHKPENIVIEMARENQTTTKGLQQSRERKKRIEEGIKELESQILKENPVENTQLQNEKLYLYYLQNGRDMYVDQELDINRLSDYDVDHIVPQSFIKDDSIDNKVLTRSVENRGKSDNVPSEEVVKKMKNYWRQLLNAKLITQRKFDNLTKAERGGLSEADKAGFIKRQLVETRQITKHVARILDSRMNTKRDKNDKPIREVKVITLKSKLVSDFRKDFQLYKVRDINNYHHAHDAYLNAVVGTALIKKYPKLESEFVYGDYKVYDVRKMIAKSEQEIGKATAKRFFYSNIMNFFKTEVKLANGEIRKRPLIETNGETGEVVWNKEKDFATVRKVLAMPQVNIVKKTEVQTGGFSKESILSKRESAKLIPRKKGWDTRKYGGFGSPTVAYSILVVAKVEKGKAKKLKSVKVLVGITIMEKGSYEKDPIGFLEAKGYKDIKKELIFKLPKYSLFELENGRRRMLASATELQKANELVLPQHLVRLLYYTQNISATTGSNNLGYIEQHREEFKEIFEKIIDFSEKYILKNKVNSNLKSSFDEQFAVSDSILLSNSFVSLLKYTSFGASGGFTFLDLDVKQGRLRYQTVTEVLDATLIYQSITGLYETRTDLSQLGGD

SEQ ID NO: 359 - protein, 1368 aa, Streptococcus pyogenes
  misc_feature (10)..(10): Xaa can be any naturally occurring amino acid
  misc_feature (840)..(840): Xaa can be any naturally occurring amino acid
MDKKYSIGLXIGTNSVGWAVITDEYKVPSKKFKVLGNTDRHSIKKNLIGALLFDSGETAEATRLKRTARRRYTRRKNRICYLQEIFSNEMAKVDDSFFHRLEESFLVEEDKKHERHPIFGNIVDEVAYHEKYPTIYHLRKKLVDSTDKADLRLIYLALAHMIKFRGHFLIEGDLNPDNSDVDKLFIQLVQTYNQLFEENPINASGVDAKAILSARLSKSRRLENLIAQLPGEKKNGLFGNLIALSLGLTPNFKSNFDLAEDAKLQLSKDTYDDDLDNLLAQIGDQYADLFLAAKNLSDAILLSDILRVNTEITKAPLSASMIKRYDEHHQDLTLLKALVRQQLPEKYKEIFFDQSKNGYAGYIDGGASQEEFYKFIKPILEKMDGTEELLVKLNREDLLRKQRTFDNGSIPHQIHLGELHAILRRQEDFYPFLKDNREKIEKILTFRIPYYVGPLARGNSRFAWMTRKSEETITPWNFEEVVDKGASAQSFIERMTNFDKNLPNEKVLPKHSLLYEYFTVYNELTKVKYVTEGMRKPAFLSGEQKKAIVDLLFKTNRKVTVKQLKEDYFKKIECFDSVEISGVEDRFNASLGTYHDLLKIIKDKDFLDNEENEDILEDIVLTLTLFEDREMIEERLKTYAHLFDDKVMKQLKRRRYTGWGRLSRKLINGIRDKQSGKTILDFLKSDGFANRNFMQLIHDDSLTFKEDIQKAQVSGQGDSLHEHIANLAGSPAIKKGILQTVKVVDELVKVMGRHKPENIVIEMARENQTTQKGQKNSRERMKRIEEGIKELGSQILKEHPVENTQLQNEKLYLYYLQNGRDMYVDQELDINRLSDYDVDXIVPQSFLKDDSIDNKVLTRSDKNRGKSDNVPSEEVVKKMKNYWRQLLNAKLITQRKFDNLTKAERGGLSELDKAGFIKRQLVETRQITKHVAQILDSRMNTKYDENDKLIREVKVITLKSKLVSDFRKDFQFYKVREINNYHHAHDAYLNAVVGTALIKKYPKLESEFVYGDYKVYDVRKMIAKSEQEIGKATAKYFFYSNIMNFFKTEITLANGEIRKRPLIETNGETGEIVWDKGRDFATVRKVLSMPQVNIVKKTEVQTGGFSKESILPKRNSDKLIARKKDWDPKKYGGFDSPTVAYSVLVVAKVEKGKSKKLKSVKELLGITIMERSSFEKNPIDFLEAKGYKEVKKDLIIKLPKYSLFELENGRKRMLASAGELQKGNELALPSKYVNFLYLASHYEKLKGSPEDNEQKQLFVEQHKHYLDEIIEQISEFSKRVILADANLDKVLSAYNKHRDKPIREQAENIIHLFTLTNLGAPAAFKYFDTTIDRKRYTSTKEVLDATLIHQSITGLYETRIDLSQLGGD

SEQ ID NO: 360 - protein, 1368 aa, Streptococcus pyogenes
MDKKYSIGLAIGTNSVGWAVITDEYKVPSKKFKVLGNTDRHSIKKNLIGALLFDSGETAEATRLKRTARRRYTRRKNRICYLQEIFSNEMAKVDDSFFHRLEESFLVEEDKKHERHPIFGNIVDEVAYHEKYPTIYHLRKKLVDSTDKADLRLIYLALAHMIKFRGHFLIEGDLNPDNSDVDKLFIQLVQTYNQLFEENPINASGVDAKAILSARLSKSRRLENLIAQLPGEKKNGLFGNLIALSLGLTPNFKSNFDLAEDAKLQLSKDTYDDDLDNLLAQIGDQYADLFLAAKNLSDAILLSDILRVNTEITKAPLSASMIKRYDEHHQDLTLLKALVRQQLPEKYKEIFFDQSKNGYAGYIDGGASQEEFYKFIKPILEKMDGTEELLVKLNREDLLRKQRTFDNGSIPHQIHLGELHAILRRQEDFYPFLKDNREKIEKILTFRIPYYVGPLARGNSRFAWMTRKSEETITPWNFEEVVDKGASAQSFIERMTNFDKNLPNEKVLPKHSLLYEYFTVYNELTKVKYVTEGMRKPAFLSGEQKKAIVDLLFKTNRKVTVKQLKEDYFKKIECFDSVEISGVEDRFNASLGTYHDLLKIIKDKDFLDNEENEDILEDIVLTLTLFEDREMIEERLKTYAHLFDDKVMKQLKRRRYTGWGRLSRKLINGIRDKQSGKTILDFLKSDGFANRNFMQLIHDDSLTFKEDIQKAQVSGQGDSLHEHIANLAGSPAIKKGILQTVKVVDELVKVMGRHKPENIVIEMARENQTTQKGQKNSRERMKRIEEGIKELGSQILKEHPVENTQLQNEKLYLYYLQNGRDMYVDQELDINRLSDYDVDAIVPQSFLKDDSIDNKVLTRSDKNRGKSDNVPSEEVVKKMKNYWRQLLNAKLITQRKFDNLTKAERGGLSELDKAGFIKRQLVETRQITKHVAQILDSRMNTKYDENDKLIREVKVITLKSKLVSDFRKDFQFYKVREINNYHHAHDAYLNAVVGTALIKKYPKLESEFVYGDYKVYDVRKMIAKSEQEIGKATAKYFFYSNIMNFFKTEITLANGEIRKRPLIETNGETGEIVWDKGRDFATVRKVLSMPQVNIVKKTEVQTGGFSKESILPKRNSDKLIARKKDWDPKKYGGFDSPTVAYSVLVVAKVEKGKSKKLKSVKELLGITIMERSSFEKNPIDFLEAKGYKEVKKDLIIKLPKYSLFELENGRKRMLASAGELQKGNELALPSKYVNFLYLASHYEKLKGSPEDNEQKQLFVEQHKHYLDEIIEQISEFSKRVILADANLDKVLSAYNKHRDKPIREQAENIIHLFTLTNLGAPAAFKYFDTTIDRKRYTSTKEVLDATLIHQSITGLYETRIDLSQLGGD

SEQ ID NO: 361 - protein, 1368 aa, Streptococcus pyogenes
  misc_feature (10)..(10): Xaa can be any naturally occurring amino acid
MDKKYSIGLXIGTNSVGWAVITDEYKVPSKKFKVLGNTDRHSIKKNLIGALLFDSGETAEATRLKRTARRRYTRRKNRICYLQEIFSNEMAKVDDSFFHRLEESFLVEEDKKHERHPIFGNIVDEVAYHEKYPTIYHLRKKLVDSTDKADLRLIYLALAHMIKFRGHFLIEGDLNPDNSDVDKLFIQLVQTYNQLFEENPINASGVDAKAILSARLSKSRRLENLIAQLPGEKKNGLFGNLIALSLGLTPNFKSNFDLAEDAKLQLSKDTYDDDLDNLLAQIGDQYADLFLAAKNLSDAILLSDILRVNTEITKAPLSASMIKRYDEHHQDLTLLKALVRQQLPEKYKEIFFDQSKNGYAGYIDGGASQEEFYKFIKPILEKMDGTEELLVKLNREDLLRKQRTFDNGSIPHQIHLGELHAILRRQEDFYPFLKDNREKIEKILTFRIPYYVGPLARGNSRFAWMTRKSEETITPWNFEEVVDKGASAQSFIERMTNFDKNLPNEKVLPKHSLLYEYFTVYNELTKVKYVTEGMRKPAFLSGEQKKAIVDLLFKTNRKVTVKQLKEDYFKKIECFDSVEISGVEDRFNASLGTYHDLLKIIKDKDFLDNEENEDILEDIVLTLTLFEDREMIEERLKTYAHLFDDKVMKQLKRRRYTGWGRLSRKLINGIRDKQSGKTILDFLKSDGFANRNFMQLIHDDSLTFKEDIQKAQVSGQGDSLHEHIANLAGSPAIKKGILQTVKVVDELVKVMGRHKPENIVIEMARENQTTQKGQKNSRERMKRIEEGIKELGSQILKEHPVENTQLQNEKLYLYYLQNGRDMYVDQELDINRLSDYDVDHIVPQSFLKDDSIDNKVLTRSDKNRGKSDNVPSEEVVKKMKNYWRQLLNAKLITQRKFDNLTKAERGGLSELDKAGFIKRQLVETRQITKHVAQILDSRMNTKYDENDKLIREVKVITLKSKLVSDFRKDFQFYKVREINNYHHAHDAYLNAVVGTALIKKYPKLESEFVYGDYKVYDVRKMIAKSEQEIGKATAKYFFYSNIMNFFKTEITLANGEIRKRPLIETNGETGEIVWDKGRDFATVRKVLSMPQVNIVKKTEVQTGGFSKESILPKRNSDKLIARKKDWDPKKYGGFDSPTVAYSVLVVAKVEKGKSKKLKSVKELLGITIMERSSFEKNPIDFLEAKGYKEVKKDLIIKLPKYSLFELENGRKRMLASAGELQKGNELALPSKYVNFLYLASHYEKLKGSPEDNEQKQLFVEQHKHYLDEIIEQISEFSKRVILADANLDKVLSAYNKHRDKPIREQAENIIHLFTLTNLGAPAAFKYFDTTIDRKRYTSTKEVLDATLIHQSITGLYETRIDLSQLGGD

SEQ ID NO: 362 - protein, 1368 aa, Streptococcus pyogenes
  misc_feature (762)..(762): Xaa can be any naturally occurring amino acid
MDKKYSIGLDIGTNSVGWAVITDEYKVPSKKFKVLGNTDRHSIKKNLIGALLFDSGETAEATRLKRTARRRYTRRKNRICYLQEIFSNEMAKVDDSFFHRLEESFLVEEDKKHERHPIFGNIVDEVAYHEKYPTIYHLRKKLVDSTDKADLRLIYLALAHMIKFRGHFLIEGDLNPDNSDVDKLFIQLVQTYNQLFEENPINASGVDAKAILSARLSKSRRLENLIAQLPGEKKNGLFGNLIALSLGLTPNFKSNFDLAEDAKLQLSKDTYDDDLDNLLAQIGDQYADLFLAAKNLSDAILLSDILRVNTEITKAPLSASMIKRYDEHHQDLTLLKALVRQQLPEKYKEIFFDQSKNGYAGYIDGGASQEEFYKFIKPILEKMDGTEELLVKLNREDLLRKQRTFDNGSIPHQIHLGELHAILRRQEDFYPFLKDNREKIEKILTFRIPYYVGPLARGNSRFAWMTRKSEETITPWNFEEVVDKGASAQSFIERMTNFDKNLPNEKVLPKHSLLYEYFTVYNELTKVKYVTEGMRKPAFLSGEQKKAIVDLLFKTNRKVTVKQLKEDYFKKIECFDSVEISGVEDRFNASLGTYHDLLKIIKDKDFLDNEENEDILEDIVLTLTLFEDREMIEERLKTYAHLFDDKVMKQLKRRRYTGWGRLSRKLINGIRDKQSGKTILDFLKSDGFANRNFMQLIHDDSLTFKEDIQKAQVSGQGDSLHEHIANLAGSPAIKKGILQTVKVVDELVKVMGRHKPENIVIXMARENQTTQKGQKNSRERMKRIEEGIKELGSQILKEHPVENTQLQNEKLYLYYLQNGRDMYVDQELDINRLSDYDVDHIVPQSFLKDDSIDNKVLTRSDKNRGKSDNVPSEEVVKKMKNYWRQLLNAKLITQRKFDNLTKAERGGLSELDKAGFIKRQLVETRQITKHVAQILDSRMNTKYDENDKLIREVKVITLKSKLVSDFRKDFQFYKVREINNYHHAHDAYLNAVVGTALIKKYPKLESEFVYGDYKVYDVRKMIAKSEQEIGKATAKYFFYSNIMNFFKTEITLANGEIRKRPLIETNGETGEIVWDKGRDFATVRKVLSMPQVNIVKKTEVQTGGFSKESILPKRNSDKLIARKKDWDPKKYGGFDSPTVAYSVLVVAKVEKGKSKKLKSVKELLGITIMERSSFEKNPIDFLEAKGYKEVKKDLIIKLPKYSLFELENGRKRMLASAGELQKGNELALPSKYVNFLYLASHYEKLKGSPEDNEQKQLFVEQHKHYLDEIIEQISEFSKRVILADANLDKVLSAYNKHRDKPIREQAENIIHLFTLTNLGAPAAFKYFDTTIDRKRYTSTKEVLDATLIHQSITGLYETRIDLSQLGGD

SEQ ID NO: 363 - protein, 1368 aa, Streptococcus pyogenes
  misc_feature (983)..(983): Xaa can be any naturally occurring amino acid
MDKKYSIGLDIGTNSVGWAVITDEYKVPSKKFKVLGNTDRHSIKKNLIGALLFDSGETAEATRLKRTARRRYTRRKNRICYLQEIFSNEMAKVDDSFFHRLEESFLVEEDKKHERHPIFGNIVDEVAYHEKYPTIYHLRKKLVDSTDKADLRLIYLALAHMIKFRGHFLIEGDLNPDNSDVDKLFIQLVQTYNQLFEENPINASGVDAKAILSARLSKSRRLENLIAQLPGEKKNGLFGNLIALSLGLTPNFKSNFDLAEDAKLQLSKDTYDDDLDNLLAQIGDQYADLFLAAKNLSDAILLSDILRVNTEITKAPLSASMIKRYDEHHQDLTLLKALVRQQLPEKYKEIFFDQSKNGYAGYIDGGASQEEFYKFIKPILEKMDGTEELLVKLNREDLLRKQRTFDNGSIPHQIHLGELHAILRRQEDFYPFLKDNREKIEKILTFRIPYYVGPLARGNSRFAWMTRKSEETITPWNFEEVVDKGASAQSFIERMTNFDKNLPNEKVLPKHSLLYEYFTVYNELTKVKYVTEGMRKPAFLSGEQKKAIVDLLFKTNRKVTVKQLKEDYFKKIECFDSVEISGVEDRFNASLGTYHDLLKIIKDKDFLDNEENEDILEDIVLTLTLFEDREMIEERLKTYAHLFDDKVMKQLKRRRYTGWGRLSRKLINGIRDKQSGKTILDFLKSDGFANRNFMQLIHDDSLTFKEDIQKAQVSGQGDSLHEHIANLAGSPAIKKGILQTVKVVDELVKVMGRHKPENIVIEMARENQTTQKGQKNSRERMKRIEEGIKELGSQILKEHPVENTQLQNEKLYLYYLQNGRDMYVDQELDINRLSDYDVDHIVPQSFLKDDSIDNKVLTRSDKNRGKSDNVPSEEVVKKMKNYWRQLLNAKLITQRKFDNLTKAERGGLSELDKAGFIKRQLVETRQITKHVAQILDSRMNTKYDENDKLIREVKVITLKSKLVSDFRKDFQFYKVREINNYHXAHDAYLNAVVGTALIKKYPKLESEFVYGDYKVYDVRKMIAKSEQEIGKATAKYFFYSNIMNFFKTEITLANGEIRKRPLIETNGETGEIVWDKGRDFATVRKVLSMPQVNIVKKTEVQTGGFSKESILPKRNSDKLIARKKDWDPKKYGGFDSPTVAYSVLVVAKVEKGKSKKLKSVKELLGITIMERSSFEKNPIDFLEAKGYKEVKKDLIIKLPKYSLFELENGRKRMLASAGELQKGNELALPSKYVNFLYLASHYEKLKGSPEDNEQKQLFVEQHKHYLDEIIEQISEFSKRVILADANLDKVLSAYNKHRDKPIREQAENIIHLFTLTNLGAPAAFKYFDTTIDRKRYTSTKEVLDATLIHQSITGLYETRIDLSQLGGD

SEQ ID NO: 364 - protein, 1368 aa, Streptococcus pyogenes
  misc_feature (986)..(986): Xaa can be any naturally occurring amino acid
MDKKYSIGLDIGTNSVGWAVITDEYKVPSKKFKVLGNTDRHSIKKNLIGALLFDSGETAEATRLKRTARRRYTRRKNRICYLQEIFSNEMAKVDDSFFHRLEESFLVEEDKKHERHPIFGNIVDEVAYHEKYPTIYHLRKKLVDSTDKADLRLIYLALAHMIKFRGHFLIEGDLNPDNSDVDKLFIQLVQTYNQLFEENPINASGVDAKAILSARLSKSRRLENLIAQLPGEKKNGLFGNLIALSLGLTPNFKSNFDLAEDAKLQLSKDTYDDDLDNLLAQIGDQYADLFLAAKNLSDAILLSDILRVNTEITKAPLSASMIKRYDEHHQDLTLLKALVRQQLPEKYKEIFFDQSKNGYAGYIDGGASQEEFYKFIKPILEKMDGTEELLVKLNREDLLRKQRTFDNGSIPHQIHLGELHAILRRQEDFYPFLKDNREKIEKILTFRIPYYVGPLARGNSRFAWMTRKSEETITPWNFEEVVDKGASAQSFIERMTNFDKNLPNEKVLPKHSLLYEYFTVYNELTKVKYVTEGMRKPAFLSGEQKKAIVDLLFKTNRKVTVKQLKEDYFKKIECFDSVEISGVEDRFNASLGTYHDLLKIIKDKDFLDNEENEDILEDIVLTLTLFEDREMIEERLKTYAHLFDDKVMKQLKRRRYTGWGRLSRKLINGIRDKQSGKTILDFLKSDGFANRNFMQLIHDDSLTFKEDIQKAQVSGQGDSLHEHIANLAGSPAIKKGILQTVKVVDELVKVMGRHKPENIVIEMARENQTTQKGQKNSRERMKRIEEGIKELGSQILKEHPVENTQLQNEKLYLYYLQNGRDMYVDQELDINRLSDYDVDHIVPQSFLKDDSIDNKVLTRSDKNRGKSDNVPSEEVVKKMKNYWRQLLNAKLITQRKFDNLTKAERGGLSELDKAGFIKRQLVETRQITKHVAQILDSRMNTKYDENDKLIREVKVITLKSKLVSDFRKDFQFYKVREINNYHHAHXAYLNAVVGTALIKKYPKLESEFVYGDYKVYDVRKMIAKSEQEIGKATAKYFFYSNIMNFFKTEITLANGEIRKRPLIETNGETGEIVWDKGRDFATVRKVLSMPQVNIVKKTEVQTGGFSKESILPKRNSDKLIARKKDWDPKKYGGFDSPTVAYSVLVVAKVEKGKSKKLKSVKELLGITIMERSSFEKNPIDFLEAKGYKEVKKDLIIKLPKYSLFELENGRKRMLASAGELQKGNELALPSKYVNFLYLASHYEKLKGSPEDNEQKQLFVEQHKHYLDEIIEQISEFSKRVILADANLDKVLSAYNKHRDKPIREQAENIIHLFTLTNLGAPAAFKYFDTTIDRKRYTSTKEVLDATLIHQSITGLYETRIDLSQLGGD

SEQ ID NO: 365 - protein, 1368 aa, Streptococcus pyogenes
MDKKYSIGLAIGTNSVGWAVITDEYKVPSKKFKVLGNTDRHSIKKNLIGALLFDSGETAEATRLKRTARRRYTRRKNRICYLQEIFSNEMAKVDDSFFHRLEESFLVEEDKKHERHPIFGNIVDEVAYHEKYPTIYHLRKKLVDSTDKADLRLIYLALAHMIKFRGHFLIEGDLNPDNSDVDKLFIQLVQTYNQLFEENPINASGVDAKAILSARLSKSRRLENLIAQLPGEKKNGLFGNLIALSLGLTPNFKSNFDLAEDAKLQLSKDTYDDDLDNLLAQIGDQYADLFLAAKNLSDAILLSDILRVNTEITKAPLSASMIKRYDEHHQDLTLLKALVRQQLPEKYKEIFFDQSKNGYAGYIDGGASQEEFYKFIKPILEKMDGTEELLVKLNREDLLRKQRTFDNGSIPHQIHLGELHAILRRQEDFYPFLKDNREKIEKILTFRIPYYVGPLARGNSRFAWMTRKSEETITPWNFEEVVDKGASAQSFIERMTNFDKNLPNEKVLPKHSLLYEYFTVYNELTKVKYVTEGMRKPAFLSGEQKKAIVDLLFKTNRKVTVKQLKEDYFKKIECFDSVEISGVEDRFNASLGTYHDLLKIIKDKDFLDNEENEDILEDIVLTLTLFEDREMIEERLKTYAHLFDDKVMKQLKRRRYTGWGRLSRKLINGIRDKQSGKTILDFLKSDGFANRNFMQLIHDDSLTFKEDIQKAQVSGQGDSLHEHIANLAGSPAIKKGILQTVKVVDELVKVMGRHKPENIVIEMARENQTTQKGQKNSRERMKRIEEGIKELGSQILKEHPVENTQLQNEKLYLYYLQNGRDMYVDQELDINRLSDYDVDHIVPQSFLKDDSIDNKVLTRSDKNRGKSDNVPSEEVVKKMKNYWRQLLNAKLITQRKFDNLTKAERGGLSELDKAGFIKRQLVETRQITKHVAQILDSRMNTKYDENDKLIREVKVITLKSKLVSDFRKDFQFYKVREINNYHHAHDAYLNAVVGTALIKKYPKLESEFVYGDYKVYDVRKMIAKSEQEIGKATAKYFFYSNIMNFFKTEITLANGEIRKRPLIETNGETGEIVWDKGRDFATVRKVLSMPQVNIVKKTEVQTGGFSKESILPKRNSDKLIARKKDWDPKKYGGFDSPTVAYSVLVVAKVEKGKSKKLKSVKELLGITIMERSSFEKNPIDFLEAKGYKEVKKDLIIKLPKYSLFELENGRKRMLASAGELQKGNELALPSKYVNFLYLASHYEKLKGSPEDNEQKQLFVEQHKHYLDEIIEQISEFSKRVILADANLDKVLSAYNKHRDKPIREQAENIIHLFTLTNLGAPAAFKYFDTTIDRKRYTSTKEVLDATLIHQSITGLYETRIDLSQLGGD

SEQ ID NO: 366 - protein, 1368 aa, Streptococcus pyogenes
MDKKYSIGLDIGTNSVGWAVITDEYKVPSKKFKVLGNTDRHSIKKNLIGALLFDSGETAEATRLKRTARRRYTRRKNRICYLQEIFSNEMAKVDDSFFHRLEESFLVEEDKKHERHPIFGNIVDEVAYHEKYPTIYHLRKKLVDSTDKADLRLIYLALAHMIKFRGHFLIEGDLNPDNSDVDKLFIQLVQTYNQLFEENPINASGVDAKAILSARLSKSRRLENLIAQLPGEKKNGLFGNLIALSLGLTPNFKSNFDLAEDAKLQLSKDTYDDDLDNLLAQIGDQYADLFLAAKNLSDAILLSDILRVNTEITKAPLSASMIKRYDEHHQDLTLLKALVRQQLPEKYKEIFFDQSKNGYAGYIDGGASQEEFYKFIKPILEKMDGTEELLVKLNREDLLRKQRTFDNGSIPHQIHLGELHAILRRQEDFYPFLKDNREKIEKILTFRIPYYVGPLARGNSRFAWMTRKSEETITPWNFEEVVDKGASAQSFIERMTNFDKNLPNEKVLPKHSLLYEYFTVYNELTKVKYVTEGMRKPAFLSGEQKKAIVDLLFKTNRKVTVKQLKEDYFKKIECFDSVEISGVEDRFNASLGTYHDLLKIIKDKDFLDNEENEDILEDIVLTLTLFEDREMIEERLKTYAHLFDDKVMKQLKRRRYTGWGRLSRKLINGIRDKQSGKTILDFLKSDGFANRNFMQLIHDDSLTFKEDIQKAQVSGQGDSLHEHIANLAGSPAIKKGILQTVKVVDELVKVMGRHKPENIVIAMARENQTTQKGQKNSRERMKRIEEGIKELGSQILKEHPVENTQLQNEKLYLYYLQNGRDMYVDQELDINRLSDYDVDHIVPQSFLKDDSIDNKVLTRSDKNRGKSDNVPSEEVVKKMKNYWRQLLNAKLITQRKFDNLTKAERGGLSELDKAGFIKRQLVETRQITKHVAQILDSRMNTKYDENDKLIREVKVITLKSKLVSDFRKDFQFYKVREINNYHHAHDAYLNAVVGTALIKKYPKLESEFVYGDYKVYDVRKMIAKSEQEIGKATAKYFFYSNIMNFFKTEITLANGEIRKRPLIETNGETGEIVWDKGRDFATVRKVLSMPQVNIVKKTEVQTGGFSKESILPKRNSDKLIARKKDWDPKKYGGFDSPTVAYSVLVVAKVEKGKSKKLKSVKELLGITIMERSSFEKNPIDFLEAKGYKEVKKDLIIKLPKYSLFELENGRKRMLASAGELQKGNELALPSKYVNFLYLASHYEKLKGSPEDNEQKQLFVEQHKHYLDEIIEQISEFSKRVILADANLDKVLSAYNKHRDKPIREQAENIIHLFTLTNLGAPAAFKYFDTTIDRKRYTSTKEVLDATLIHQSITGLYETRIDLSQLGGD

SEQ ID NO: 367 - protein, 1368 aa, Streptococcus pyogenes
MDKKYSIGLDIGTNSVGWAVITDEYKVPSKKFKVLGNTDRHSIKKNLIGALLFDSGETAEATRLKRTARRRYTRRKNRICYLQEIFSNEMAKVDDSFFHRLEESFLVEEDKKHERHPIFGNIVDEVAYHEKYPTIYHLRKKLVDSTDKADLRLIYLALAHMIKFRGHFLIEGDLNPDNSDVDKLFIQLVQTYNQLFEENPINASGVDAKAILSARLSKSRRLENLIAQLPGEKKNGLFGNLIALSLGLTPNFKSNFDLAEDAKLQLSKDTYDDDLDNLLAQIGDQYADLFLAAKNLSDAILLSDILRVNTEITKAPLSASMIKRYDEHHQDLTLLKALVRQQLPEKYKEIFFDQSKNGYAGYIDGGASQEEFYKFIKPILEKMDGTEELLVKLNREDLLRKQRTFDNGSIPHQIHLGELHAILRRQEDFYPFLKDNREKIEKILTFRIPYYVGPLARGNSRFAWMTRKSEETITPWNFEEVVDKGASAQSFIERMTNFDKNLPNEKVLPKHSLLYEYFTVYNELTKVKYVTEGMRKPAFLSGEQKKAIVDLLFKTNRKVTVKQLKEDYFKKIECFDSVEISGVEDRFNASLGTYHDLLKIIKDKDFLDNEENEDILEDIVLTLTLFEDREMIEERLKTYAHLFDDKVMKQLKRRRYTGWGRLSRKLINGIRDKQSGKTILDFLKSDGFANRNFMQLIHDDSLTFKEDIQKAQVSGQGDSLHEHIANLAGSPAIKKGILQTVKVVDELVKVMGRHKPENIVIEMARENQTTQKGQKNSRERMKRIEEGIKELGSQILKEHPVENTQLQNEKLYLYYLQNGRDMYVDQELDINRLSDYDVDHIVPQSFLKDDSIDNKVLTRSDKNRGKSDNVPSEEVVKKMKNYWRQLLNAKLITQRKFDNLTKAERGGLSELDKAGFIKRQLVETRQITKHVAQILDSRMNTKYDENDKLIREVKVITLKSKLVSDFRKDFQFYKVREINNYHAAHDAYLNAVVGTALIKKYPKLESEFVYGDYKVYDVRKMIAKSEQEIGKATAKYFFYSNIMNFFKTEITLANGEIRKRPLIETNGETGEIVWDKGRDFATVRKVLSMPQVNIVKKTEVQTGGFSKESILPKRNSDKLIARKKDWDPKKYGGFDSPTVAYSVLVVAKVEKGKSKKLKSVKELLGITIMERSSFEKNPIDFLEAKGYKEVKKDLIIKLPKYSLFELENGRKRMLASAGELQKGNELALPSKYVNFLYLASHYEKLKGSPEDNEQKQLFVEQHKHYLDEIIEQISEFSKRVILADANLDKVLSAYNKHRDKPIREQAENIIHLFTLTNLGAPAAFKYFDTTIDRKRYTSTKEVLDATLIHQSITGLYETRIDLSQLGGD

SEQ ID NO: 368 - protein, 1368 aa, Streptococcus pyogenes
MDKKYSIGLDIGTNSVGWAVITDEYKVPSKKFKVLGNTDRHSIKKNLIGALLFDSGETAEATRLKRTARRRYTRRKNRICYLQEIFSNEMAKVDDSFFHRLEESFLVEEDKKHERHPIFGNIVDEVAYHEKYPTIYHLRKKLVDSTDKADLRLIYLALAHMIKFRGHFLIEGDLNPDNSDVDKLFIQLVQTYNQLFEENPINASGVDAKAILSARLSKSRRLENLIAQLPGEKKNGLFGNLIALSLGLTPNFKSNFDLAEDAKLQLSKDTYDDDLDNLLAQIGDQYADLFLAAKNLSDAILLSDILRVNTEITKAPLSASMIKRYDEHHQDLTLLKALVRQQLPEKYKEIFFDQSKNGYAGYIDGGASQEEFYKFIKPILEKMDGTEELLVKLNREDLLRKQRTFDNGSIPHQIHLGELHAILRRQEDFYPFLKDNREKIEKILTFRIPYYVGPLARGNSRFAWMTRKSEETITPWNFEEVVDKGASAQSFIERMTNFDKNLPNEKVLPKHSLLYEYFTVYNELTKVKYVTEGMRKPAFLSGEQKKAIVDLLFKTNRKVTVKQLKEDYFKKIECFDSVEISGVEDRFNASLGTYHDLLKIIKDKDFLDNEENEDILEDIVLTLTLFEDREMIEERLKTYAHLFDDKVMKQLKRRRYTGWGRLSRKLINGIRDKQSGKTILDFLKSDGFANRNFMQLIHDDSLTFKEDIQKAQVSGQGDSLHEHIANLAGSPAIKKGILQTVKVVDELVKVMGRHKPENIVIEMARENQTTQKGQKNSRERMKRIEEGIKELGSQILKEHPVENTQLQNEKLYLYYLQNGRDMYVDQELDINRLSDYDVDHIVPQSFLKDDSIDNKVLTRSDKNRGKSDNVPSEEVVKKMKNYWRQLLNAKLITQRKFDNLTKAERGGLSELDKAGFIKRQLVETRQITKHVAQILDSRMNTKYDENDKLIREVKVITLKSKLVSDFRKDFQFYKVREINNYHHAHAAYLNAVVGTALIKKYPKLESEFVYGDYKVYDVRKMIAKSEQEIGKATAKYFFYSNIMNFFKTEITLANGEIRKRPLIETNGETGEIVWDKGRDFATVRKVLSMPQVNIVKKTEVQTGGFSKESILPKRNSDKLIARKKDWDPKKYGGFDSPTVAYSVLVVAKVEKGKSKKLKSVKELLGITIMERSSFEKNPIDFLEAKGYKEVKKDLIIKLPKYSLFELENGRKRMLASAGELQKGNELALPSKYVNFLYLASHYEKLKGSPEDNEQKQLFVEQHKHYLDEIIEQISEFSKRVILADANLDKVLSAYNKHRDKPIREQAENIIHLFTLTNLGAPAAFKYFDTTIDRKRYTSTKEVLDATLIHQSITGLYETRIDLSQLGGD

SEQ ID NO: 369 - protein, 1368 aa, Streptococcus pyogenes
  misc_feature (840)..(840): Xaa can be any naturally occurring amino acid
MDKKYSIGLDIGTNSVGWAVITDEYKVPSKKFKVLGNTDRHSIKKNLIGALLFDSGETAEATRLKRTARRRYTRRKNRICYLQEIFSNEMAKVDDSFFHRLEESFLVEEDKKHERHPIFGNIVDEVAYHEKYPTIYHLRKKLVDSTDKADLRLIYLALAHMIKFRGHFLIEGDLNPDNSDVDKLFIQLVQTYNQLFEENPINASGVDAKAILSARLSKSRRLENLIAQLPGEKKNGLFGNLIALSLGLTPNFKSNFDLAEDAKLQLSKDTYDDDLDNLLAQIGDQYADLFLAAKNLSDAILLSDILRVNTEITKAPLSASMIKRYDEHHQDLTLLKALVRQQLPEKYKEIFFDQSKNGYAGYIDGGASQEEFYKFIKPILEKMDGTEELLVKLNREDLLRKQRTFDNGSIPHQIHLGELHAILRRQEDFYPFLKDNREKIEKILTFRIPYYVGPLARGNSRFAWMTRKSEETITPWNFEEVVDKGASAQSFIERMTNFDKNLPNEKVLPKHSLLYEYFTVYNELTKVKYVTEGMRKPAFLSGEQKKAIVDLLFKTNRKVTVKQLKEDYFKKIECFDSVEISGVEDRFNASLGTYHDLLKIIKDKDFLDNEENEDILEDIVLTLTLFEDREMIEERLKTYAHLFDDKVMKQLKRRRYTGWGRLSRKLINGIRDKQSGKTILDFLKSDGFANRNFMQLIHDDSLTFKEDIQKAQVSGQGDSLHEHIANLAGSPAIKKGILQTVKVVDELVKVMGRHKPENIVIEMARENQTTQKGQKNSRERMKRIEEGIKELGSQILKEHPVENTQLQNEKLYLYYLQNGRDMYVDQELDINRLSDYDVDXIVPQSFLKDDSIDNKVLTRSDKNRGKSDNVPSEEVVKKMKNYWRQLLNAKLITQRKFDNLTKAERGGLSELDKAGFIKRQLVETRQITKHVAQILDSRMNTKYDENDKLIREVKVITLKSKLVSDFRKDFQFYKVREINNYHHAHDAYLNAVVGTALIKKYPKLESEFVYGDYKVYDVRKMIAKSEQEIGKATAKYFFYSNIMNFFKTEITLANGEIRKRPLIETNGETGEIVWDKGRDFATVRKVLSMPQVNIVKKTEVQTGGFSKESILPKRNSDKLIARKKDWDPKKYGGFDSPTVAYSVLVVAKVEKGKSKKLKSVKELLGITIMERSSFEKNPIDFLEAKGYKEVKKDLIIKLPKYSLFELENGRKRMLASAGELQKGNELALPSKYVNFLYLASHYEKLKGSPEDNEQKQLFVEQHKHYLDEIIEQISEFSKRVILADANLDKVLSAYNKHRDKPIREQAENIIHLFTLTNLGAPAAFKYFDTTIDRKRYTSTKEVLDATLIHQSITGLYETRIDLSQLGGD

SEQ ID NO: 370 - protein, 1368 aa, Streptococcus pyogenes
MDKKYSIGLDIGTNSVGWAVITDEYKVPSKKFKVLGNTDRHSIKKNLIGALLFDSGETAEATRLKRTARRRYTRRKNRICYLQEIFSNEMAKVDDSFFHRLEESFLVEEDKKHERHPIFGNIVDEVAYHEKYPTIYHLRKKLVDSTDKADLRLIYLALAHMIKFRGHFLIEGDLNPDNSDVDKLFIQLVQTYNQLFEENPINASGVDAKAILSARLSKSRRLENLIAQLPGEKKNGLFGNLIALSLGLTPNFKSNFDLAEDAKLQLSKDTYDDDLDNLLAQIGDQYADLFLAAKNLSDAILLSDILRVNTEITKAPLSASMIKRYDEHHQDLTLLKALVRQQLPEKYKEIFFDQSKNGYAGYIDGGASQEEFYKFIKPILEKMDGTEELLVKLNREDLLRKQRTFDNGSIPHQIHLGELHAILRRQEDFYPFLKDNREKIEKILTFRIPYYVGPLARGNSRFAWMTRKSEETITPWNFEEVVDKGASAQSFIERMTNFDKNLPNEKVLPKHSLLYEYFTVYNELTKVKYVTEGMRKPAFLSGEQKKAIVDLLFKTNRKVTVKQLKEDYFKKIECFDSVEISGVEDRFNASLGTYHDLLKIIKDKDFLDNEENEDILEDIVLTLTLFEDREMIEERLKTYAHLFDDKVMKQLKRRRYTGWGRLSRKLINGIRDKQSGKTILDFLKSDGFANRNFMQLIHDDSLTFKEDIQKAQVSGQGDSLHEHIANLAGSPAIKKGILQTVKVVDELVKVMGRHKPENIVIEMARENQTTQKGQKNSRERMKRIEEGIKELGSQILKEHPVENTQLQNEKLYLYYLQNGRDMYVDQELDINRLSDYDVDAIVPQSFLKDDSIDNKVLTRSDKNRGKSDNVPSEEVVKKMKNYWRQLLNAKLITQRKFDNLTKAERGGLSELDKAGFIKRQLVETRQITKHVAQILDSRMNTKYDENDKLIREVKVITLKSKLVSDFRKDFQFYKVREINNYHHAHDAYLNAVVGTALIKKYPKLESEFVYGDYKVYDVRKMIAKSEQEIGKATAKYFFYSNIMNFFKTEITLANGEIRKRPLIETNGETGEIVWDKGRDFATVRKVLSMPQVNIVKKTEVQTGGFSKESILPKRNSDKLIARKKDWDPKKYGGFDSPTVAYSVLVVAKVEKGKSKKLKSVKELLGITIMERSSFEKNPIDFLEAKGYKEVKKDLIIKLPKYSLFELENGRKRMLASAGELQKGNELALPSKYVNFLYLASHYEKLKGSPEDNEQKQLFVEQHKHYLDEIIEQISEFSKRVILADANLDKVLSAYNKHRDKPIREQAENIIHLFTLTNLGAPAAFKYFDTTIDRKRYTSTKEVLDATLIHQSITGLYETRIDLSQLGGD

SEQ ID NO: 371 - protein, 1368 aa, Streptococcus pyogenes
  misc_feature (864)..(864): Xaa can be any naturally occurring amino acid
MDKKYSIGLDIGTNSVGWAVITDEYKVPSKKFKVLGNTDRHSIKKNLIGALLFDSGETAEATRLKRTARRRYTRRKNRICYLQEIFSNEMAKVDDSFFHRLEESFLVEEDKKHERHPIFGNIVDEVAYHEKYPTIYHLRKKLVDSTDKADLRLIYLALAHMIKFRGHFLIEGDLNPDNSDVDKLFIQLVQTYNQLFEENPINASGVDAKAILSARLSKSRRLENLIAQLPGEKKNGLFGNLIALSLGLTPNFKSNFDLAEDAKLQLSKDTYDDDLDNLLAQIGDQYADLFLAAKNLSDAILLSDILRVNTEITKAPLSASMIKRYDEHHQDLTLLKALVRQQLPEKYKEIFFDQSKNGYAGYIDGGASQEEFYKFIKPILEKMDGTEELLVKLNREDLLRKQRTFDNGSIPHQIHLGELHAILRRQEDFYPFLKDNREKIEKILTFRIPYYVGPLARGNSRFAWMTRKSEETITPWNFEEVVDKGASAQSFIERMTNFDKNLPNEKVLPKHSLLYEYFTVYNELTKVKYVTEGMRKPAFLSGEQKKAIVDLLFKTNRKVTVKQLKEDYFKKIECFDSVEISGVEDRFNASLGTYHDLLKIIKDKDFLDNEENEDILEDIVLTLTLFEDREMIEERLKTYAHLFDDKVMKQLKRRRYTGWGRLSRKLINGIRDKQSGKTILDFLKSDGFANRNFMQLIHDDSLTFKEDIQKAQVSGQGDSLHEHIANLAGSPAIKKGILQTVKVVDELVKVMGRHKPENIVIEMARENQTTQKGQKNSRERMKRIEEGIKELGSQILKEHPVENTQLQNEKLYLYYLQNGRDMYVDQELDINRLSDYDVDHIVPQSFLKDDSIDNKVLTRSDKNXGKSDNVPSEEVVKKMKNYWRQLLNAKLITQRKFDNLTKAERGGLSELDKAGFIKRQLVETRQITKHVAQILDSRMNTKYDENDKLIREVKVITLKSKLVSDFRKDFQFYKVREINNYHHAHDAYLNAVVGTALIKKYPKLESEFVYGDYKVYDVRKMIAKSEQEIGKATAKYFFYSNIMNFFKTEITLANGEIRKRPLIETNGETGEIVWDKGRDFATVRKVLSMPQVNIVKKTEVQTGGFSKESILPKRNSDKLIARKKDWDPKKYGGFDSPTVAYSVLVVAKVEKGKSKKLKSVKELLGITIMERSSFEKNPIDFLEAKGYKEVKKDLIIKLPKYSLFELENGRKRMLASAGELQKGNELALPSKYVNFLYLASHYEKLKGSPEDNEQKQLFVEQHKHYLDEIIEQISEFSKRVILADANLDKVLSAYNKHRDKPIREQAENIIHLFTLTNLGAPAAFKYFDTTIDRKRYTSTKEVLDATLIHQSITGLYETRIDLSQLGGD

SEQ ID NO: 372 - protein, 1368 aa, Streptococcus pyogenes
MDKKYSIGLDIGTNSVGWAVITDEYKVPSKKFKVLGNTDRHSIKKNLIGALLFDSGETAEATRLKRTARRRYTRRKNRICYLQEIFSNEMAKVDDSFFHRLEESFLVEEDKKHERHPIFGNIVDEVAYHEKYPTIYHLRKKLVDSTDKADLRLIYLALAHMIKFRGHFLIEGDLNPDNSDVDKLFIQLVQTYNQLFEENPINASGVDAKAILSARLSKSRRLENLIAQLPGEKKNGLFGNLIALSLGLTPNFKSNFDLAEDAKLQLSKDTYDDDLDNLLAQIGDQYADLFLAAKNLSDAILLSDILRVNTEITKAPLSASMIKRYDEHHQDLTLLKALVRQQLPEKYKEIFFDQSKNGYAGYIDGGASQEEFYKFIKPILEKMDGTEELLVKLNREDLLRKQRTFDNGSIPHQIHLGELHAILRRQEDFYPFLKDNREKIEKILTFRIPYYVGPLARGNSRFAWMTRKSEETITPWNFEEVVDKGASAQSFIERMTNFDKNLPNEKVLPKHSLLYEYFTVYNELTKVKYVTEGMRKPAFLSGEQKKAIVDLLFKTNRKVTVKQLKEDYFKKIECFDSVEISGVEDRFNASLGTYHDLLKIIKDKDFLDNEENEDILEDIVLTLTLFEDREMIEERLKTYAHLFDDKVMKQLKRRRYTGWGRLSRKLINGIRDKQSGKTILDFLKSDGFANRNFMQLIHDDSLTFKEDIQKAQVSGQGDSLHEHIANLAGSPAIKKGILQTVKVVDELVKVMGRHKPENIVIEMARENQTTQKGQKNSRERMKRIEEGIKELGSQILKEHPVENTQLQNEKLYLYYLQNGRDMYVDQELDINRLSDYDVDHIVPQSFLKDDSIDNKVLTRSDKNAGKSDNVPSEEVVKKMKNYWRQLLNAKLITQRKFDNLTKAERGGLSELDKAGFIKRQLVETRQITKHVAQILDSRMNTKYDENDKLIREVKVITLKSKLVSDFRKDFQFYKVREINNYHHAHDAYLNAVVGTALIKKYPKLESEFVYGDYKVYDVRKMIAKSEQEIGKATAKYFFYSNIMNFFKTEITLANGEIRKRPLIETNGETGEIVWDKGRDFATVRKVLSMPQVNIVKKTEVQTGGFSKESILPKRNSDKLIARKKDWDPKKYGGFDSPTVAYSVLVVAKVEKGKSKKLKSVKELLGITIMERSSFEKNPIDFLEAKGYKEVKKDLIIKLPKYSLFELENGRKRMLASAGELQKGNELALPSKYVNFLYLASHYEKLKGSPEDNEQKQLFVEQHKHYLDEIIEQISEFSKRVILADANLDKVLSAYNKHRDKPIREQAENIIHLFTLTNLGAPAAFKYFDTTIDRKRYTSTKEVLDATLIHQSITGLYETRIDLSQLGGD

SEQ ID NO: 373 - protein, 1367 aa, Streptococcus pyogenes
  misc_feature (839)..(839): Xaa can be any naturally occurring amino acid
DKKYSIGLDIGTNSVGWAVITDEYKVPSKKFKVLGNTDRHSIKKNLIGALLFDSGETAEATRLKRTARRRYTRRKNRICYLQEIFSNEMAKVDDSFFHRLEESFLVEEDKKHERHPIFGNIVDEVAYHEKYPTIYHLRKKLVDSTDKADLRLIYLALAHMIKFRGHFLIEGDLNPDNSDVDKLFIQLVQTYNQLFEENPINASGVDAKAILSARLSKSRRLENLIAQLPGEKKNGLFGNLIALSLGLTPNFKSNFDLAEDAKLQLSKDTYDDDLDNLLAQIGDQYADLFLAAKNLSDAILLSDILRVNTEITKAPLSASMIKRYDEHHQDLTLLKALVRQQLPEKYKEIFFDQSKNGYAGYIDGGASQEEFYKFIKPILEKMDGTEELLVKLNREDLLRKQRTFDNGSIPHQIHLGELHAILRRQEDFYPFLKDNREKIEKILTFRIPYYVGPLARGNSRFAWMTRKSEETITPWNFEEVVDKGASAQSFIERMTNFDKNLPNEKVLPKHSLLYEYFTVYNELTKVKYVTEGMRKPAFLSGEQKKAIVDLLFKTNRKVTVKQLKEDYFKKIECFDSVEISGVEDRFNASLGTYHDLLKIIKDKDFLDNEENEDILEDIVLTLTLFEDREMIEERLKTYAHLFDDKVMKQLKRRRYTGWGRLSRKLINGIRDKQSGKTILDFLKSDGFANRNFMQLIHDDSLTFKEDIQKAQVSGQGDSLHEHIANLAGSPAIKKGILQTVKVVDELVKVMGRHKPENIVIEMARENQTTQKGQKNSRERMKRIEEGIKELGSQILKEHPVENTQLQNEKLYLYYLQNGRDMYVDQELDINRLSDYDVDXIVPQSFLKDDSIDNKVLTRSDKNRGKSDNVPSEEVVKKMKNYWRQLLNAKLITQRKFDNLTKAERGGLSELDKAGFIKRQLVETRQITKHVAQILDSRMNTKYDENDKLIREVKVITLKSKLVSDFRKDFQFYKVREINNYHHAHDAYLNAVVGTALIKKYPKLESEFVYGDYKVYDVRKMIAKSEQEIGKATAKYFFYSNIMNFFKTEITLANGEIRKRPLIETNGETGEIVWDKGRDFATVRKVLSMPQVNIVKKTEVQTGGFSKESILPKRNSDKLIARKKDWDPKKYGGFDSPTVAYSVLVVAKVEKGKSKKLKSVKELLGITIMERSSFEKNPIDFLEAKGYKEVKKDLIIKLPKYSLFELENGRKRMLASAGELQKGNELALPSKYVNFLYLASHYEKLKGSPEDNEQKQLFVEQHKHYLDEIIEQISEFSKRVILADANLDKVLSAYNKHRDKPIREQAENIIHLFTLTNLGAPAAFKYFDTTIDRKRYTSTKEVLDATLIHQSITGLYETRIDLSQLGGD

SEQ ID NO: 374 - protein, 1367 aa, Streptococcus pyogenes
DKKYSIGLDIGTNSVGWAVITDEYKVPSKKFKVLGNTDRHSIKKNLIGALLFDSGETAEATRLKRTARRRYTRRKNRICYLQEIFSNEMAKVDDSFFHRLEESFLVEEDKKHERHPIFGNIVDEVAYHEKYPTIYHLRKKLVDSTDKADLRLIYLALAHMIKFRGHFLIEGDLNPDNSDVDKLFIQLVQTYNQLFEENPINASGVDAKAILSARLSKSRRLENLIAQLPGEKKNGLFGNLIALSLGLTPNFKSNFDLAEDAKLQLSKDTYDDDLDNLLAQIGDQYADLFLAAKNLSDAILLSDILRVNTEITKAPLSASMIKRYDEHHQDLTLLKALVRQQLPEKYKEIFFDQSKNGYAGYIDGGASQEEFYKFIKPILEKMDGTEELLVKLNREDLLRKQRTFDNGSIPHQIHLGELHAILRRQEDFYPFLKDNREKIEKILTFRIPYYVGPLARGNSRFAWMTRKSEETITPWNFEEVVDKGASAQSFIERMTNFDKNLPNEKVLPKHSLLYEYFTVYNELTKVKYVTEGMRKPAFLSGEQKKAIVDLLFKTNRKVTVKQLKEDYFKKIECFDSVEISGVEDRFNASLGTYHDLLKIIKDKDFLDNEENEDILEDIVLTLTLFEDREMIEERLKTYAHLFDDKVMKQLKRRRYTGWGRLSRKLINGIRDKQSGKTILDFLKSDGFANRNFMQLIHDDSLTFKEDIQKAQVSGQGDSLHEHIANLAGSPAIKKGILQTVKVVDELVKVMGRHKPENIVIEMARENQTTQKGQKNSRERMKRIEEGIKELGSQILKEHPVENTQLQNEKLYLYYLQNGRDMYVDQELDINRLSDYDVDAIVPQSFLKDDSIDNKVLTRSDKNRGKSDNVPSEEVVKKMKNYWRQLLNAKLITQRKFDNLTKAERGGLSELDKAGFIKRQLVETRQITKHVAQILDSRMNTKYDENDKLIREVKVITLKSKLVSDFRKDFQFYKVREINNYHHAHDAYLNAVVGTALIKKYPKLESEFVYGDYKVYDVRKMIAKSEQEIGKATAKYFFYSNIMNFFKTEITLANGEIRKRPLIETNGETGEIVWDKGRDFATVRKVLSMPQVNIVKKTEVQTGGFSKESILPKRNSDKLIARKKDWDPKKYGGFDSPTVAYSVLVVAKVEKGKSKKLKSVKELLGITIMERSSFEKNPIDFLEAKGYKEVKKDLIIKLPKYSLFELENGRKRMLASAGELQKGNELALPSKYVNFLYLASHYEKLKGSPEDNEQKQLFVEQHKHYLDEIIEQISEFSKRVILADANLDKVLSAYNKHRDKPIREQAENIIHLFTLTNLGAPAAFKYFDTTIDRKRYTSTKEVLDATLIHQSITGLYETRIDLSQLGGD

SEQ ID NO: 375 - protein, 1367 aa, Streptococcus pyogenes
  misc_feature (863)..(863): Xaa can be any naturally occurring amino acid
DKKYSIGLDIGTNSVGWAVITDEYKVPSKKFKVLGNTDRHSIKKNLIGALLFDSGETAEATRLKRTARRRYTRRKNRICYLQEIFSNEMAKVDDSFFHRLEESFLVEEDKKHERHPIFGNIVDEVAYHEKYPTIYHLRKKLVDSTDKADLRLIYLALAHMIKFRGHFLIEGDLNPDNSDVDKLFIQLVQTYNQLFEENPINASGVDAKAILSARLSKSRRLENLIAQLPGEKKNGLFGNLIALSLGLTPNFKSNFDLAEDAKLQLSKDTYDDDLDNLLAQIGDQYADLFLAAKNLSDAILLSDILRVNTEITKAPLSASMIKRYDEHHQDLTLLKALVRQQLPEKYKEIFFDQSKNGYAGYIDGGASQEEFYKFIKPILEKMDGTEELLVKLNREDLLRKQRTFDNGSIPHQIHLGELHAILRRQEDFYPFLKDNREKIEKILTFRIPYYVGPLARGNSRFAWMTRKSEETITPWNFEEVVDKGASAQSFIERMTNFDKNLPNEKVLPKHSLLYEYFTVYNELTKVKYVTEGMRKPAFLSGEQKKAIVDLLFKTNRKVTVKQLKEDYFKKIECFDSVEISGVEDRFNASLGTYHDLLKIIKDKDFLDNEENEDILEDIVLTLTLFEDREMIEERLKTYAHLFDDKVMKQLKRRRYTGWGRLSRKLINGIRDKQSGKTILDFLKSDGFANRNFMQLIHDDSLTFKEDIQKAQVSGQGDSLHEHIANLAGSPAIKKGILQTVKVVDELVKVMGRHKPENIVIEMARENQTTQKGQKNSRERMKRIEEGIKELGSQILKEHPVENTQLQNEKLYLYYLQNGRDMYVDQELDINRLSDYDVDHIVPQSFLKDDSIDNKVLTRSDKNXGKSDNVPSEEVVKKMKNYWRQLLNAKLITQRKFDNLTKAERGGLSELDKAGFIKRQLVETRQITKHVAQILDSRMNTKYDENDKLIREVKVITLKSKLVSDFRKDFQFYKVREINNYHHAHDAYLNAVVGTALIKKYPKLESEFVYGDYKVYDVRKMIAKSEQEIGKATAKYFFYSNIMNFFKTEITLANGEIRKRPLIETNGETGEIVWDKGRDFATVRKVLSMPQVNIVKKTEVQTGGFSKESILPKRNSDKLIARKKDWDPKKYGGFDSPTVAYSVLVVAKVEKGKSKKLKSVKELLGITIMERSSFEKNPIDFLEAKGYKEVKKDLIIKLPKYSLFELENGRKRMLASAGELQKGNELALPSKYVNFLYLASHYEKLKGSPEDNEQKQLFVEQHKHYLDEIIEQISEFSKRVILADANLDKVLSAYNKHRDKPIREQAENIIHLFTLTNLGAPAAFKYFDTTIDRKRYTSTKEVLDATLIHQSITGLYETRIDLSQLGGD

SEQ ID NO: 376 - protein, 1367 aa, Streptococcus pyogenes
DKKYSIGLDIGTNSVGWAVITDEYKVPSKKFKVLGNTDRHSIKKNLIGALLFDSGETAEATRLKRTARRRYTRRKNRICYLQEIFSNEMAKVDDSFFHRLEESFLVEEDKKHERHPIFGNIVDEVAYHEKYPTIYHLRKKLVDSTDKADLRLIYLALAHMIKFRGHFLIEGDLNPDNSDVDKLFIQLVQTYNQLFEENPINASGVDAKAILSARLSKSRRLENLIAQLPGEKKNGLFGNLIALSLGLTPNFKSNFDLAEDAKLQLSKDTYDDDLDNLLAQIGDQYADLFLAAKNLSDAILLSDILRVNTEITKAPLSASMIKRYDEHHQDLTLLKALVRQQLPEKYKEIFFDQSKNGYAGYIDGGASQEEFYKFIKPILEKMDGTEELLVKLNREDLLRKQRTFDNGSIPHQIHLGELHAILRRQEDFYPFLKDNREKIEKILTFRIPYYVGPLARGNSRFAWMTRKSEETITPWNFEEVVDKGASAQSFIERMTNFDKNLPNEKVLPKHSLLYEYFTVYNELTKVKYVTEGMRKPAFLSGEQKKAIVDLLFKTNRKVTVKQLKEDYFKKIECFDSVEISGVEDRFNASLGTYHDLLKIIKDKDFLDNEENEDILEDIVLTLTLFEDREMIEERLKTYAHLFDDKVMKQLKRRRYTGWGRLSRKLINGIRDKQSGKTILDFLKSDGFANRNFMQLIHDDSLTFKEDIQKAQVSGQGDSLHEHIANLAGSPAIKKGILQTVKVVDELVKVMGRHKPENIVIEMARENQTTQKGQKNSRERMKRIEEGIKELGSQILKEHPVENTQLQNEKLYLYYLQNGRDMYVDQELDINRLSDYDVDHIVPQSFLKDDSIDNKVLTRSDKNAGKSDNVPSEEVVKKMKNYWRQLLNAKLITQRKFDNLTKAERGGLSELDKAGFIKRQLVETRQITKHVAQILDSRMNTKYDENDKLIREVKVITLKSKLVSDFRKDFQFYKVREINNYHHAHDAYLNAVVGTALIKKYPKLESEFVYGDYKVYDVRKMIAKSEQEIGKATAKYFFYSNIMNFFKTEITLANGEIRKRPLIETNGETGEIVWDKGRDFATVRKVLSMPQVNIVKKTEVQTGGFSKESILPKRNSDKLIARKKDWDPKKYGGFDSPTVAYSVLVVAKVEKGKSKKLKSVKELLGITIMERSSFEKNPIDFLEAKGYKEVKKDLIIKLPKYSLFELENGRKRMLASAGELQKGNELALPSKYVNFLYLASHYEKLKGSPEDNEQKQLFVEQHKHYLDEIIEQISEFSKRVILADANLDKVLSAYNKHRDKPIREQAENIIHLFTLTNLGAPAAFKYFDTTIDRKRYTSTKEVLDATLIHQSITGLYETRIDLSQLGGD

SEQ ID NO: 377 - protein, 1053 aa, Staphylococcus aureus; identical to SEQ ID NO: 347

SEQ ID NO: 378 - protein, 1082 aa, N. meningitidis
MAAFKPNSINYILGLDIGIASVGWAMVEIDEEENPIRLIDLGVRVFERAEVPKTGDSLAMARRLARSVRRLTRRRAHRLLRTRRLLKREGVLQAANFDENGLIKSLPNTPWQLRAAALDRKLTPLEWSAVLLHLIKHRGYLSQRKNEGETADKELGALLKGVAGNAHALQTGDFRTPAELALNKFEKESGHIRNQRSDYSHTFSRKDLQAELILLFEKQKEFGNPHVSGGLKEGIETLLMTQRPALSGDAVQKMLGHCTFEPAEPKAAKNTYTAERFIWLTKLNNLRILEQGSERPLTDTERATLMDEPYRKSKLTYAQARKLLGLEDTAFFKGLRYGKDNAEASTLMEMKAYHAISRALEKEGLKDKKSPLNLSPELQDEIGTAFSLFKTDEDITGRLKDRIQPEILEALLKHISFDKFVQISLKALRRIVPLMEQGKRYDEACAEIYGDHYGKKNTEEKIYLPPIPADEIRNPVVLRALSQARKVINGVVRRYGSPARIHIETAREVGKSFKDRKEIEKRQEENRKDREKAAAKFREYFPNFVGEPKSKDILKLRLYEQQHGKCLYSGKEINLGRLNEKGYVEIDAALPFSRTWDDSFNNKVLVLGSENQNKGNQTPYEYFNGKDNSREWQEFKARVETSRFPRSKKQRILLQKFDEDGFKERNLNDTRYVNRFLCQFVADRMRLTGKGKKRVFASNGQITNLLRGFWGLRKVRAENDRHHALDAVVVACSTVAMQQKITRFVRYKEMNAFDGKTIDKETGEVLHQKTHFPQPWEFFAQEVMIRVFGKPDGKPEFEEADTLEKLRTLLAEKLSSRPEAVHEYVTPLFVSRAPNRKMSGQGHMETVKSAKRLDEGVSVLRVPLTQLKLKDLEKMVNREREPKLYEALKARLEAHKDDPAKAFAEPFYKYDKAGNRTQQVKAVRVEQVQKTGVWVRNHNGIADNATMVRVDVFEKGDKYYLVPIYSWQVAKGILPDRAVVQGKDEEDWQLIDDSFNFKFSLHPNDLVEVITKKARMFGYFASCHRGTGNINIRIHDLDHKIGKNGILEGIGVKTALSFQKYQIDELGKEIRPCRLKKRPPVR

SEQ ID NO: 379 - protein, 984 aa, C. jejuni
MARILAFDIGISSIGWAFSENDELKDCGVRIFTKVENPKTGESLALPRRLARSARKRLARRKARLNHLKHLIANEFKLNYEDYQSFDESLAKAYKGSLISPYELRFRALNELLSKQDFARVILHIAKRRGYDDIKNSDDKEKGAILKAIKQNEEKLANYQSVGEYLYKEYFQKFKENSKEFTNVRNKKESYERCIAQSFLKDELKLIFKKQREFGFSFSKKFEEEVLSVAFYKRALKDFSHLVGNCSFFTDEKRAPKNSPLAFMFVALTRIINLLNNLKNTEGILYTKDDLNALLNEVLKNGTLTYKQTKKLLGLSDDYEFKGEKGTYFIEFKKYKEFIKALGEHNLSQDDLNEIAKDITLIKDEIKLKKALAKYDLNQNQIDSLSKLEFKDHLNISFKALKLVTPLMLEGKKYDEACNELNLKVAINEDKKDFLPAFNETYYKDEVTNPVVLRAIKEYRKVLNALLKKYGKVHKINIELAREVGKNHSQRAKIEKEQNENYKAKKDAELECEKLGLKINSKNILKLRLFKEQKEFCAYSGEKIKISDLQDEKMLEIDHIYPYSRSFDDSYMNKVLVFTKQNQEKLNQTPFEAFGNDSAKWQKIEVLAKNLPTKKQKRILDKNYKDKEQKNFKDRNLNDTRYIARLVLNYTKDYLDFLPLSDDENTKLNDTQKGSKVHVEAKSGMLTSALRHTWGFSAKDRNNHLHHAIDAVIIAYANNSIVKAFSDFKKEQESNSAELYAKKISELDYKNKRKFFEPFSGFRQKVLDKIDEIFVSKPERKKPSGALHEETFRKEEEFYQSYGGKEGVLKALELGKIRKVNGKIVKNGDMFRVDIFKHKKTNKFYAVPIYTMDFALKVLPNKAVARSKKGEIKDWILMDENYEFCFSLYKDSLILIQTKDMQEPEFVYYNAFTSSTVSLIVSKHDNKFETLSKNQKILFKNANEKEVIAKSIGIQNLKVFEKYIVSALGEVTKAEFRQREDFKK

SEQ ID NO: 380 - protein, 1087 aa, G. stearothermophilus
MRYKIGLDIGITSVGWAVMNLDIPRIEDLGVRIFDRAENPQTGESLALPRRLARSARRRLRRRKHRLERIRRLVIREGILTKEELDKLFEEKHEIDVWQLRVEALDRKLNNDELARVLLHLAKRRGFKSNRKSERSNKENSTMLKHIEENRAILSSYRTVGEMIVKDPKFALHKRNKGENYTNTIARDDLEREIRLIFSKQREFGNMSCTEEFENEYITIWASQRPVASKDDIEKKVGFCTFEPKEKRAPKATYTFQSFIAWEHINKLRLISPSGARGLTDEERRLLYEQAFQKNKITYHDIRTLLHLPDDTYFKGIVYDRGESRKQNENIRFLELDAYHQIRKAVDKVYGKGKSSSFLPIDFDTFGYALTLFKDDADIHSYLRNEYEQNGKRMPNLANKVYDNELIEELLNLSFTKFGHLSLKALRSILPYMEQGEVYSSACERAGYTFTGPKKKQKTMLLPNIPPIANPVVMRALTQARKVVNAIIKKYGSPVSIHIELARDLSQTFDERRKTKKEQDENRKKNETAIRQLMEYGLTLNPTGHDIVKFKLWSEQNGRCAYSLQPIEIERLLEPGYVEVDHVIPYSRSLDDSYTNKVLVLTRENREKGNRIPAEYLGVGTERWQQFETFVLTNKQFSKKKRDRLLRLHYDENEETEFKNRNLNDTRYISRFFANFIREHLKFAESDDKQKVYTVNGRVTAHLRSRWEFNKNREESDLHHAVDAVIVACTTPSDIAKVTAFYQRREQNKELAKKTEPHFPQPWPHFADELRARLSKHPKESIKALNLGNYDDQKLESLQPVFVSRMPKRSVTGAAHQETLRRYVGIDERSGKIQTVVKTKLSEIKLDASGHFPMYGKESDPRTYEAIRQRLLEHNNDPKKAFQEPLYKPKKNGEPGPVIRTVKIIDTKNQVIPLNDGKTVAYNSNIVRVDVFEKDGKYYCVPVYTMDIMKGILPNKAIEPNKPYSEWKEMTEDYTFRFSLYPNDLIRIELPREKTVKTAAGEEINVKDVFVYYKTIDSANGGLELISHDHRFSLRGVGSRTLKRFEKYQVDVLGNIYKVRGEKRVGLASSAHSKPGKTIRPLQSTRD

SEQ ID NO: 381 - protein, 1228 aa, L. bacterium
MSKLEKFTNCYSLSKTLRFKAIPVGKTQENIDNKRLLVEDEKRAEDYKGVKKLLDRYYLSFINDVLHSIKLKNLNNYISLFRKKTRTEKENKELENLEINLRKEIAKAFKGNEGYKSLFKKDIIETILPEFLDDKDEIALVNSFNGFTTAFTGFFDNRENMFSEEAKSTSIAFRCINENLTRYISNMDIFEKVDAIFDKHEVQEIKEKILNSDYDVEDFFEGEFFNFVLTQEGIDVYNAIIGGFVTESGEKIKGLNEYINLYNQKTKQKLPKFKPLYKQVLSDRESLSFYGEGYTSDEEVLEVFRNTLNKNSEIFSSIKKLEKLFKNFDEYSSAGIFVKNGPAISTISKDIFGEWNVIRDKWNAEYDDIHLKKKAVVTEKYEDDRRKSFKKIGSFSLEQLQEYADADLSVVEKLKEIIIQKVDEIYKVYGSSEKLFDADFVLEKSLKKNDAVVAIMKDLLDSVKSFENYIKAFFGEGKETNRDESFYGDFVLAYDILLKVDHIYDAIRNYVTQKPYSKDKFKLYFQNPQFMGGWDKDKETDYRATILRYGSKYYLAIMDKKYAKCLQKIDKDDVNGNYEKINYKLLPGPNKMLPKVFFSKKWMAYYNPSEDIQKIYKNGTFKKGDMFNLNDCHKLIDFFKDSISRYPKWSNAYDFNFSETEKYKDIAGFYREVEEQGYKVSFESASKKEVDKLVEEGKLYMFQIYNKDFSDKSHGTPNLHTMYFKLLFDENNHGQIRLSGGAELFMRRASLKKEELVVHPANSPIANKNPDNPKKTTTLSYDVYKDKRFSEDQYELHIPIAINKCPKNIFKINTEVRVLLKHDDNPYVIGIDRGERNLLYIVVVDGKGNIVEQYSLNEIINNFNGIRIKTDYHSLLDKKEKERFEARQNWTSIENIKELKAGYISQVVHKICELVEKYDAVIALEDLNSGFKNSRVKVEKQVYQKFEKMLIDKLNYMVDKKSNPCATGGALKGYQITNKFESFKSMSTQNGFIFYIPAWLTSKIDPSTGFVNLLKTKYTSIADSKKFISSFDRIMYVPEEDLFEFALDYKNFSRTDADYIKKWKLYSYGNRIRIFRNPKKNNVFDWEEVCLTSAYKELFNKYGINYQQGDIRALLCEQSDKAFYSSFMALMSLMLQMRNSITGRTDVDFLISPVKNSDGIFYDSRNYEAQENAILPKNADANGAYNIARKVLWAIGQFKKAEDEKLDKVKIAISNKEWLEYAQTSVKH

SEQ ID NO: 382 - protein, 1108 aa, B. hisashii
MATRSFILKIEPNEEVKKGLWKTHEVLNHGIAYYMNILKLIRQEAIYEHHEQDPKNPKKVSKAEIQAELWDFVLKMQKCNSFTHEVDKDEVFNILRELYEELVPSSVEKKGEANQLSNKFLYPLVDPNSQSGKGTASSGRKPRWYNLKIAGDPSWEEEKKKWEEDKKKDPLAKILGKLAEYGLIPLFIPYTDSNEPIVKEIKWMEKSRNQSVRRLDKDMFIQALERFLSWESWNLKVKEEYEKVEKEYKTLEERIKEDIQALKALEQYEKERQEQLLRDTLNTNEYRLSKRGLRGWREIIQKWLKMDENEPSEKYLEVFKDYQRKHPREAGDYSVYEFLSKKENHFIWRNHPEYPYLYATFCEIDKKKKDAKQQATFTLADPINHPLWVRFEERSGSNLNKYRILTEQLHTEKLKKKLTVQLDRLIYPTESGGWEEKGKVDIVLLPSRQFYNQIFLDIEEKGKHAFTYKDESIKFPLKGTLGGARVQFDRDHLRRYPHKVESGNVGRIYFNMTVNIEPTESPVSKSLKIHRDDFPKVVNFKPKELTEWIKDSKGKKLKSGIESLEIGLRVMSIDLGQRQAAAASIFEVVDQKPDIEGKLFFPIKGTELYAVHRASFNIKLPGETLVKSREVLRKAREDNLKLMNQKLNFLRNVLHFQQFEDITEREKRVTKWISRQENSDVPLVYQDELIQIRELMYKPYKDWVAFLKQLHKRLEVEIGKEVKHWRKSLSDGRKGLYGISLKNIDEIDRTRKFLLRWSLRPTEPGEVRRLEPGQRFAIDQLNHLNALKEDRLKKMANTIIMHALGYCYDVRKKKWQAKNPACQIILFEDLSNYNPYEERSRFENSKLMKWSRREIPRQVALQGEIYGLQVGEVGAQFSSRFHAKTGSPGIRCSVVTKEKLQDNRFFKNLQREGRLTLDKIAVLKEGDLYPDKGGEKFISLSKDRKCVTTHADINAAQNLQKRFWTRTHGFYKVYCKAYQVDGQTVYIPESKDQKQKIIEEFGEGYFILKDGVYEWVNAGKLKIKKGSSKQSSSELVDSDILKDSFDLASELKGEKLMLYRDPSGNVFPSDKWMAAGVFFGKLERILISKLTNQYSISTIEDDSSKQSM

SEQ ID NO: 383 - protein, 1307 aa, Acidaminococcus sp.
MTQFEGFTNLYQVSKTLRFELIPQGKTLKHIQEQGFIEEDKARNDHYKELKPIIDRIYKTYADQCLQLVQLDWENLSAAIDSYRKEKTEETRNALIEEQATYRNAIHDYFIGRTDNLTDAINKRHAEIYKGLFKAELFNGKVLKQLGTVTTTEHENALLRSFDKFTTYFSGFYENRKNVFSAEDISTAIPHRIVQDNFPKFKENCHIFTRLITAVPSLREHFENVKKAIGIFVSTSIEEVFSFPFYNQLLTQTQIDLYNQLLGGISREAGTEKIKGLNEVLNLAIQKNDETAHIIASLPHRFIPLFKQILSDRNTLSFILEEFKSDEEVIQSFCKYKTLLRNENVLETAEALFNELNSIDLTHIFISHKKLETISSALCDHWDTLRNALYERRISELTGKITKSAKEKVQRSLKHEDINLQEIISAAGKELSEAFKQKTSEILSHAHAALDQPLPTTLKKQEEKEILKSQLDSLLGLYHLLDWFAVDESNEVDPEFSARLTGIKLEMEPSLSFYNKARNYATKKPYSVEKFKLNFQMPTLASGWDVNKEKNNGAILFVKNGLYYLGIMPKQKGRYKALSFEPTEKTSEGFDKMYYDYFPDAAKMIPKCSTQLKAVTAHFQTHTTPILLSNNFIEPLEITKEIYDLNNPEKEPKKFQTAYAKKTGDQKGYREALCKWIDFTRDFLSKYTKTTSIDLSSLRPSSQYKDLGEYYAELNPLLYHISFQRIAEKEIMDAVETGKLYLFQIYNKDFAKGHHGKPNLHTLYWTGLFSPENLAKTSIKLNGQAELFYRPKSRMKRMAHRLGEKMLNKKLKDQKTPIPDTLYQELYDYVNHRLSHDLSDEARALLPNVITKEVSHEIIKDRRFTSDKFFFHVPITLNYQAANSPSKFNQRVNAYLKEHPETPIIGIDRGERNLIYITVIDSTGKILEQRSLNTIQQFDYQKKLDNREKERVAARQAWSVVGTIKDLKQGYLSQVIHEIVDLMIHYQAVVVLENLNFGFKSKRTGIAEKAVYQQFEKMLIDKLNCLVLKDYPAEKVGGVLNPYQLTDQFTSFAKMGTQSGFLFYVPAPYTSKIDPLTGFVDPFVWKTIKNHESRKHFLEGFDFLHYDVKTGDFILHFKMNRNLSFQRGLPGFMPAWDIVFEKNETQFDAKGTPFIAGKRIVPVIENHRFTGRYRDLYPANELIALLEEKGIVFRDGSNILPKLLENDDSHAIDTMVALIRSVLQMRNSNAATGEDYINSPVRDLNGVCFDSRFQNPEWPMDADANGAYHIALKGQLLLNHLKESKDLKLQNGISNQDWLAYIQELRN

SEQ ID NO: 384 - protein, 1307 aa, Artificial Sequence
  Synthetic
MTQFEGFTNLYQVSKTLRFELIPQGKTLKHIQEQGFIEEDKARNDHYKELKPIIDRIYKTYADQCLQLVQLDWENLSAAIDSYRKEKTEETRNALIEEQATYRNAIHDYFIGRTDNLTDAINKRHAEIYKGLFKAELFNGKVLKQLGTVTTTEHENALLRSFDKFTTYFSGFYENRKNVFSAEDISTAIPHRIVQDNFPKFKENCHIFTRLITAVPSLREHFENVKKAIGIFVSTSIEEVFSFPFYNQLLTQTQIDLYNQLLGGISREAGTEKIKGLNEVLNLAIQKNDETAHIIASLPHRFIPLFKQILSDRNTLSFILEEFKSDEEVIQSFCKYKTLLRNENVLETAEALFNELNSIDLTHIFISHKKLETISSALCDHWDTLRNALYERRISELTGKITKSAKEKVQRSLKHEDINLQEIISAAGKELSEAFKQKTSEILSHAHAALDQPLPTTLKKQEEKEILKSQLDSLLGLYHLLDWFAVDESNEVDPEFSARLTGIKLEMEPSLSFYNKARNYATKKPYSVEKFKLNFQMPTLASGWDVNKEKNNGAILFVKNGLYYLGIMPKQKGRYKALSFEPTEKTSEGFDKMYYDYFPDAAKMIPKCSTQLKAVTAHFQTHTTPILLSNNFIEPLEITKEIYDLNNPEKEPKKFQTAYAKKTGDQKGYREALCKWIDFTRDFLSKYTKTTSIDLSSLRPSSQYKDLGEYYAELNPLLYHISFQRIAEKEIMDAVETGKLYLFQIYNKDFAKGHHGKPNLHTLYWTGLFSPENLAKTSIKLNGQAELFYRPKSRMKRMAHRLGEKMLNKKLKDQKTPIPDTLYQELYDYVNHRLSHDLSDEARALLPNVITKEVSHEIIKDRRFTSDKFFFHVPITLNYQAANSPSKFNQRVNAYLKEHPETPIIGIDRGERNLIYITVIDSTGKILEQRSLNTIQQFDYQKKLDNREKERVAARQAWSVVGTIKDLKQGYLSQVIHEIVDLMIHYQAVVVLENLNFGFKSKRTGIAEKAVYQQFEKMLIDKLNCLVLKDYPAEKVGGVLNPYQLTDQFTSFAKMGTQSGFLFYVPAPYTSKIDPLTGFVDPFVWKTIKNHESRKHFLEGFDFLHYDVKTGDFILHFKMNRNLSFQRGLPGFMPAWDIVFEKNETQFDAKGTPFIAGKRIVPVIENHRFTGRYRDLYPANELIALLEEKGIVFRDGSNILPKLLENDDSHAIDTMVALIRSVLQMANSNAATGEDYINSPVRDLNGVCFDSRFQNPEWPMDADANGAYHIALKGQLLLNHLKESKDLKLQNGISNQDWLAYIQELRN

SEQ ID NO: 385 - protein, 1259 aa, Lachnospiraceae bacterium
MNYKTGLEDFIGKESLSKTLRNALIPTESTKIHMEEMGVIRDDELRAEKQQELKEIMDDYYRTFIEEKLGQIQGIQWNSLFQKMEETMEDISVRKDLDKIQNEKRKEICCYFTSDKRFKDLFNAKLITDILPNFIKDNKEYTEEEKAEKEQTRVLFQRFATAFTNYFNQRRNNFSEDNISTAISFRIVNENSEIHLQNMRAFQRIEQQYPEEVCGMEEEYKDMLQEWQMKHIYSVDFYDRELTQPGIEYYNGICGKINEHMNQFCQKNRINKNDFRMKKLHKQILCKKSSYYEIPFRFESDQEVYDALNEFIKTMKKKEIIRRCVHLGQECDDYDLGKIYISSNKYEQISNALYGSWDTIRKCIKEEYMDALPGKGEKKEEKAEAAAKKEEYRSIADIDKIISLYGSEMDRTISAKKCITEICDMAGQISIDPLVCNSDIKLLQNKEKTTEIKTILDSFLHVYQWGQTFIVSDIIEKDSYFYSELEDVLEDFEGITTLYNHVRSYVTQKPYSTVKFKLHFGSPTLANGWSQSKEYDNNAILLMRDQKFYLGIFNVRNKPDKQIIKGHEKEEKGDYKKMIYNLLPGPSKMLPKVFITSRSGQETYKPSKHILDGYNEKRHIKSSPKFDLGYCWDLIDYYKECIHKHPDWKNYDFHFSDTKDYEDISGFYREVEMQGYQIKWTYISADEIQKLDEKGQIFLFQIYNKDFSVHSTGKDNLHTMYLKNLFSEENLKDIVLKLNGEAELFFRKASIKTPIVHKKGSVLVNRSYTQTVGNKEIRVSIPEEYYTEIYNYLNHIGKGKLSSEAQRYLDEGKIKSFTATKDIVKNYRYCCDHYFLHLPITINFKAKSDVAVNERTLAYIAKKEDIHIIGIDRGERNLLYISVVDVHGNIREQRSFNIVNGYDYQQKLKDREKSRDAARKNWEEIEKIKELKEGYLSMVIHYIAQLVVKYNAVVAMEDLNYGFKTGRFKVERQVYQKFETMLIEKLHYLVFKDREVCEEGGVLRGYQLTYIPESLKKVGKQCGFIFYVPAGYTSKIDPTTGFVNLFSFKNLTNRESRQDFVGKFDEIRYDRDKKMFEFSFDYNNYIKKGTILASTKWKVYTNGTRLKRIVVNGKYTSQSMEVELTDAMEKMLQRAGIEYHDGKDLKGQIVEKGIEAEIIDIFRLTVQMRNSRSESEDREYDRLISPVLNDKGEFFDTATADKTLPQDADANGAYCIALKGLYEVKQIKENWKENEQFPRNKLVQDNKTWFDFMQKKRYL

SEQ ID NO: 386 - protein, 1306 aa, Prevotella copri
MAKNFEDFKRLYSLSKTLRFEAKPIGATLDNIVKSGLLDEDEHRAASYVKVKKLIDEYHKVFIDRVLDDGCLPLENKGNNNSLAEYYESYVSRAQDEDAKKKFKEIQQNLRSVIAKKLTEDKAYANLFGNKLIESYKDKEDKKKIIDSDLIQFINTAESTQLDSMSQDEAKELVKEFWGFVTYFYGFFDNRKNMYTAEEKSTGIAYRLVNENLPKFIDNIEAFNRAITRPEIQENMGVLYSDFSEYLNVESIQEMFQLDYYNMLLTQKQIDVYNAIIGGKTDDEHDVKIKGINEYINLYNQQHKDDKLPKLKALFKQILSDRNAISWLPEEFNSDQEVLNAIKDCYERLAENVLGDKVLKSLLGSLADYSLDGIFIRNDLQLTDISQKMFGNWGVIQNAIMQNIKRVAPARKHKESEEDYEKRIAGIFKKADSFSISYINDCLNEADPNNAYFVENYFATFGAVNTPTMQRENLFALVQNAYTEVAALLHSDYPTVKHLAQDKANVSKIKALLDAIKSLQHFVKPLLGKGDESDKDERFYGELASLWAELDTVTPLYNMIRNYMTRKPYSQKKIKLNFENPQLLGGWDANKEKDYATIILRRNGLYYLAIMDKDSRKLLGKAMPSDGECYEKMVYKFFKDVTTMIPKCSTQLKDVQAYFKVNTDDYVLNSKAFNKPLTITKEVFDLNNVLYGKYKKFQKGYLTATGDNVGYTHAVNVWIKFCMDFLNSYDSTCIYDFSSLKPESYLSLDAFYQDANLLLYKLSFARASVSYINQLVEEGKMYLFQIYNKDFSEYSKGTPNMHTLYWKALFDERNLADVVYKLNGQAEMFYRKKSIENTHPTHPANHPILNKNKDNKKKESLFDYDLIKDRRYTVDKFMFHVPITMNFKSVGSENINQDVKAYLRHADDMHIIGIDRGERHLLYLVVIDLQGNIKEQYSLNEIVNEYNGNTYHTNYHDLLDVREEERLKARQSWQTIENIKELKEGYLSQVIHKITQLMVRYHAIVVLEDLSKGFMRSRQKVEKQVYQKFEKMLIDKLNYLVDKKTDVSTPGGLLNAYQLTCKSDSSQKLGKQSGFLFYIPAWNTSKIDPVTGFVNLLDTHSLNSKEKIKAFFSKFDAIRYNKDKKWFEFNLDYDKFGKKAEDTRTKWTLCTRGMRIDTFRNKEKNSQWDNQEVDLTTEMKSLLEHYYIDIHGNLKDAISAQTDKAFFTGLLHILKLTLQMRNSITGTETDYLVSPVADENGIFYDSRSCGNQLPENADANGAYNIARKGLMLIEQIKNAEDLNNVKFDISNKAWLNFAQQKPYKNG

SEQ ID NO: 387 - protein, 1142 aa, Eubacterium rectale
MFSAKLISDILPEFVIHNNNYSASEKEEKTQVIKLFSRFATSFKDYFKNRANCFSANDISSSSCHRIVNDNAEIFFSNALVYRRIVKNLSNDDINKISGDMKDSLKEMSLEEIYSYEKYGEFITQEGISFYNDICGKVNLFMNLYCQKNKENKNLYKLRKLHKQILCIADTSYEVPYKFESDEEVYQSVNGFLDNISSKHIVERLRKIGENYNGYNLDKIYIVSKFYESVSQKTYRDWETINTALEIHYNNILPGNGKSKADKVKKAVKNDLQKSITEINELVSNYKLCPDDNIKAETYIHEISHILNNFEAQELKYNPEIHLVESELKASELKNVLDVIMNAFHWCSVFMTEELVDKDNNFYAELEEIYDEIYPVISLYNLVRNYVTQKPYSTKKIKLNFGIPTLADGWSKSKEYSNNAIILMRDNLYYLGIFNAKNKPDKKIIEGNTSENKGDYKKMIYNLLPGPNKMIPKVFLSSKTGVETYKPSAYILEGYKQNKHLKSSKDFDITFCHDLIDYFKNCIAIHPEWKNFGFDFSDTSTYEDISGFYREVELQGYKIDWTYISEKDIDLLQEKGQLYLFQIYNKDFSKKSSGNDNLHTMYLKNLFSEENLKDIVLKLNGEAEIFFRKSSIKNPIIHKKGSILVNRTYEAEEKDQFGNIQIVRKTIPENIYQELYKYFNDKSDKELSDEAAKLKNVVGHHEAATNIVKDYRYTYDKYFLHMPITINFKANKTSFINDRILQYIAKEKDLHVIGIDRGERNLIYVSVIDTCGNIVEQKSFNIVNGYDYQIKLKQQEGARQIARKEWKEIGKIKEIKEGYLSLVIHEISKMVIKYNAIIAMEDLSYGFKKGRFKVERQVYQKFETMLINKLNYLVFKDISITENGGLLKGYQLTYIPDKLKNVGHQCGCIFYVPAAYTSKIDPTTGFVNIFKFKDLTVDAKREFIKKFDSIRYDSDKNLFCFTFDYNNFITQNTVMSKSSWSVYTYGVRIKRRFVNGRFSNESDTIDITKDMEKTLEMTDINWRDGHDLRQDIIDYEIVQHIFEIFKLTVQMRNSLSELEDRDYDRLISPVLNENNIFYDSAKAGDALPKDADANGAYCIALKGLYEIKQITENWKEDGKFSRDKLKISNKDWFDFIQNKRYL

SEQ ID NO: 388 - protein, 1259 aa, Clostridium sp. AF34-10BH
MNYKTGLEDFIGKESLSKTLRNALIPTESTKIHMEEMGVIRDDELRAEKQQELKEIMDDYYRAFIEEKLGQIQGIQWNSLFQKMEETMEDISVRKDLDKIQNEKRKEICCYFTSDKRFKDLFNAKLITDILPNFIKDNKEYTEEEKAEKEQTRVLFQRFATAFTNYFNQRRNNFSEDNISTAISFRIVNENSEIHLQNMRAFQRIEQQYPEEVCGMEEEYKDMLQEWQMKHIYLVDFYDRVLTQPGIEYYNGICGKINEHMNQFCQKNRINKNDFRMKKLHKQILCKKSSYYEIPFRFESDQEVYDALNEFIKTMKEKEIICRCVHLGQKCDDYDLGKIYISSNKYEQISNALYGSWDTIRKCIKEEYMDALPGKGEKKEEKAEAAAKKEEYRSIADIDKIISLYGSEMDRTISAKKCITEICDMAGQISTDPLVCNSDIKLLQNKEKTTEIKTILDSFLHVYQWGQTFIVSDIIEKDSYFYSELEDVLEDFEGITTLYNHVRSYVTQKPYSTVKFKLHFGSPTLANGWSQSKEYDNNAILLMRDQKFYLGIFNVRNKPDKQIIKGHEKEEKGDYKKMIYNLLPGPSKMLPKVFITSRSGQETYKPSKHILDGYNEKRHIKSSPKFDLGYCWDLIDYYKECIHKHPDWKNYDFHFSDTKDYEDISGFYREVEMQGYQIKWTYISADEIQKLDEKGQIFLFQIYNKDFSVHSTGKDNLHTMYLKNLFSEENLKDIVLKLNGEAELFFRKASIKTPVVHKKGSVLVNRSYTQTVGDKEIRVSIPEEYYTEIYNYLNHIGRGKLSTEAQRYLEERKIKSFTATKDIVKNYRYCCDHYFLHLPITINFKAKSDIAVNERTLAYIAKKEDIHIIGIDRGERNLLYISVVDVHGNIREQRSFNIVNGYDYQQKLKDREKSRDAARKNWEEIEKIKELKEGYLSMVIHYIAQLVVKYNAVVAMEDLNYGFKTGRFKVERQVYQKFETMLIEKLHYLVFKDREVCEEGGVLRGYQLTYIPESLKKVGKQCGFIFYVPAGYTSKIDPTTGFVNLFSFKNLTNRESRQDFVGKFDEIRYDRDKKMFEFSFDYNNYIKKGTMLASTKWKVYTNGTRLKRIVVNGKYTSQSMEVELTDAMEKMLQRAGIEYHDGKDLKGQIVEKGIEAEIIDIFRLTVQMRNSRSESEDREYDRLISPVLNDKGEFFDTATADKTLPQDADANGAYCIALKGLYEVKQIKENWKENEQFPRNKLVQDNKTWFDFMQKKRYL

SEQ ID NO: 389 - protein, 1108 aa, Bacillus hisashii; identical to SEQ ID NO: 382

SEQ ID NO: 390 - protein, 1465 aa, Thermomonas hydrothermalis
MSEKTTQRAYTLRLNRASGECAVCQNNSCDCWHDALWATHKAVNRGAKAFGDWLLTLRGGLCHTLVEMEVPAKGNNPPQRPTDQERRDRRVLLALSWLSVEDEHGAPKEFIVATGRDSADDRAKKVEEKLREILEKRDFQEHEIDAWLQDCGPSLKAHIREDAVWVNRRALFDAAVERIKTLTWEEAWDFLEPFFGTQYFAGIGDGKDKDDAEGPARQGEKAKDLVQKAGQWLSARFGIGTGADFMSMAEAYEKIAKWASQAQNGDNGKATIEKLACALRPSEPPTLDTVLKCISGPGHKSATREYLKTLDKKSTVTQEDLNQLRKLADEDARNCRKKVGKKGKKPWADEVLKDVENSCELTYLQDNSPARHREFSVMLDHAARRVSMAHSWIKKAEQRRRQFESDAQKLKNLQERAPSAVEWLDRFCESRSMTTGANTGSGYRIRKRAIEGWSYVVQAWAEASCDTEDKRIAAARKVQADPEIEKFGDIQLFEALAADEAICVWRDQEGTQNPSILIDYVTGKTAEHNQKRFKVPAYRHPDELRHPVFCDFGNSRWSIQFAIHKEIRDRDKGAKQDTRQLQNRHGLKMRLWNGRSMTDVNLHWSSKRLTADLALDQNPNPNPTEVTRADRLGRAASSAFDHVKIKNVFNEKEWNGRLQAPRAELDRIAKLEEQGKTEQAEKLRKRLRWYVSFSPCLSPSGPFIVYAGQHNIQPKRSGQYAPHAQANKGRARLAQLILSRLPDLRILSVDLGHRFAAACAVWETLSSDAFRREIQGLNVLAGGSGEGDLFLHVEMTGDDGKRRTVVYRRIGPDQLLDNTPHPAPWARLDRQFLIKLQGEDEGVREASNEELWTVHKLEVEVGRTVPLIDRMVRSGFGKTEKQKERLKKLRELGWISAMPNEPSAETDEKEGEIRSISRSVDELMSSALGTLRLALKRHGNRARIAFAMTADYKPMPGGQKYYFHEAKEASKNDDETKRRDNQIEFLQDALSLWHDLFSSPDWEDNEAKKLWQNHIATLPNYQTPEEISAELKRVERNKKRKENRDKLRTAAKALAENDQLRQHLHDTWKERWESDDQQWKERLRSLKDWIFPRGKAEDNPSIRHVGGLSITRINTISGLYQILKAFKMRPEPDDLRKNIPQKGDDELENFNRRLLEARDRLREQRVKQLASRIIEAALGVGRIKIPKNGKLPKRPRTTVDTPCHAVVIESLKTYRPDDLRTRRENRQLMQWSSAKVRKYLKEGCELYGLHFLEVPANYTSRQCSRTGLPGIRCDDVPTGDFLKAPWWRRAINTAREKNGGDAKDRFLVDLYDHLNNLQSKGEALPATVRVPRQGGNLFIAGAQLDDTNKERRAIQADLNAAANIGLRALLDPDWRGRWWYVPCKDGTSEPALDRIEGSTAFNDVRSLPTGDNSSRRAPREIENLWRDPSGDSLESGTWSPTRAYWDTVQSRVIELLRRHAGLPTS

SEQ ID NO: 391 - protein, 1090 aa, Laceyella sacchari
MSIRSFKLKLKTKSGVNAEQLRRGLWRTHQLINDGIAYYMNWLVLLRQEDLFIRNKETNEIEKRSKEEIQAVLLERVHKQQQRNQWSGEVDEQTLLQALRQLYEEIVPSVIGKSGNASLKARFFLGPLVDPNNKTTKDVSKSGPTPKWKKMKDAGDPNWVQEYEKYMAERQTLVRLEEMGLIPLFPMYTDEVGDIHWLPQASGYTRTWDRDMFQQAIERLLSWESWNRRVRERRAQFEKKTHDFASRFSESDVQWMNKLREYEAQQEKSLEENAFAPNEPYALTKKALRGWERVYHSWMRLDSAASEEAYWQEVATCQTAMRGEFGDPAIYQFLAQKENHDIWRGYPERVIDFAELNHLQRELRRAKEDATFTLPDSVDHPLWVRYEAPGGTNIHGYDLVQDTKRNLTLILDKFILPDENGSWHEVKKVPFSLAKSKQFHRQVWLQEEQKQKKREVVFYDYSTNLPHLGTLAGAKLQWDRNFLNKRTQQQIEETGEIGKVFFNISVDVRPAVEVKNGRLQNGLGKALTVLTHPDGTKIVTGWKAEQLEKWVGESGRVSSLGLDSLSEGLRVMSIDLGQRTSATVSVFEITKEAPDNPYKFFYQLEGTEMFAVHQRSFLLALPGENPPQKIKQMREIRWKERNRIKQQVDQLSAILRLHKKVNEDERIQAIDKLLQKVASWQLNEEIATAWNQALSQLYSKAKENDLQWNQAIKNAHHQLEPVVGKQISLWRKDLSTGRQGIAGLSLWSIEELEATKKLLTRWSKRSREPGVVKRIERFETFAKQIQHHINQVKENRLKQLANLIVMTALGYKYDQEQKKWIEVYPACQVVLFENLRSYRFSFERSRRENKKLMEWSHRSIPKLVQMQGELFGLQVADVYAAYSSRYHGRTGAPGIRCHALTEADLRNETNIIHELIEAGFIKEEHRPYLQQGDLVPWSGGELFATLQKPYDNPRILTLHADINAAQNIQKRFWHPSMWFRVNCESVMEGEIVTYVPKNKTVHKKQGKTFRFVKVEGSDVYEWAKWSKNRNKNTFSSITERKPPSSMILFRDPSGTFFKEQEWVEQKTFWGKVQSMIQAYMKKTIVQRMEE

SEQ ID NO: 392 - protein, 1194 aa, Dsulfonatronum thiodismutans
MVLGRKDDTAELRRALWTTHEHVNLAVAEVERVLLRCRGRSYWTLDRRGDPVHVPESQVAEDALAMAREAQRRNGWPVVGEDEEILLALRYLYEQIVPSCLLDDLGKPLKGDAQKIGTNYAGPLFDSDTCRRDEGKDVACCGPFHEVAGKYLGALPEWATPISKQEFDGKDASHLRFKATGGDDAFFRVSIEKANAWYEDPANQDALKNKAYNKDDWKKEKDKGISSWAVKYIQKQLQLGQDPRTEVRRKLWLELGLLPLFIPVFDKTMVGNLWNRLAVRLALAHLLSWESWNHRAVQDQALARAKRDELAALFLGMEDGFAGLREYELRRNESIKQHAFEPVDRPYVVSGRALRSWTRVREEWLRHGDTQESRKNICNRLQDRLRGKFGDPDVFHWLAEDGQEALWKERDCVTSFSLLNDADGLLEKRKGYALMTFADARLHPRWAMYEAPGGSNLRTYQIRKTENGLWADVVLLSPRNESAAVEEKTFNVRLAPSGQLSNVSFDQIQKGSKMVGRCRYQSANQQFEGLLGGAEILFDRKRIANEQHGATDLASKPGHVWFKLTLDVRPQAPQGWLDGKGRPALPPEAKHFKTALSNKSKFADQVRPGLRVLSVDLGVRSFAACSVFELVRGGPDQGTYFPAADGRTVDDPEKLWAKHERSFKITLPGENPSRKEEIARRAAMEELRSLNGDIRRLKAILRLSVLQEDDPRTEHLRLFMEAIVDDPAKSALNAELFKGFGDDRFRSTPDLWKQHCHFFHDKAEKVVAERFSRWRTETRPKSSSWQDWRERRGYAGGKSYWAVTYLEAVRGLILRWNMRGRTYGEVNRQDKKQFGTVASALLHHINQLKEDRIKTGADMIIQAARGFVPRKNGAGWVQVHEPCRLILFEDLARYRFRTDRSRRENSRLMRWSHREIVNEVGMQGELYGLHVDTTEAGFSSRYLASSGAPGVRCRHLVEEDFHDGLPGMHLVGELDWLLPKDKDRTANEARRLLGGMVRPGMLVPWDGGELFATLNAASQLHVIHADINAAQNLQRRFWGRCGEAIRIVCNQLSVDGSTRYEMAKAPKARLLGALQQLKNGDAPFHLTSIPNSQKPENSYVMTPTNAGKKYRAGPGEKSSGEEDELALDIVEQAEELAQGRKTFFRDPSGVFFAPDRWLPSEIYWSRIRRRIWQVTLERNSSGRQERAEMDEMPY

SEQ ID NO: 393 - protein, 1300 aa, Francisella novicida
MSIYQEFVNKYSLSKTLRFELIPQGKTLENIKARGLILDDEKRAKDYKKAKQIIDKYHQFFIEEILSSVCISEDLLQNYSDVYFKLKKSDDDNLQKDFKSAKDTIKKQISEYIKDSEKFKNLFNQNLIDAKKGQESDLILWLKQSKDNGIELFKANSDITDIDEALEIIKSFKGWTTYFKGFHENRKNVYSSNDIPTSIIYRIVDDNLPKFLENKAKYESLKDKAPEAINYEQIKKDLAEELTFDIDYKTSEVNQRVFSLDEVFEIANFNNYLNQSGITKFNTIIGGKFVNGENTKRKGINEYINLYSQQINDKTLKKYKMSVLFKQILSDTESKSFVIDKLEDDSDVVTTMQSFYEQIAAFKTVEEKSIKETLSLLFDDLKAQKLDLSKIYFKNDKSLTDLSQQVFDDYSVIGTAVLEYITQQIAPKNLDNPSKKEQELIAKKTEKAKYLSLETIKLALEEFNKHRDIDKQCRFEEILANFAAIPMIFDEIAQNKDNLAQISIKYQNQGKKDLLQASAEDDVKAIKDLLDQTNNLLHKLKIFHISQSEDKANILDKDEHFYLVFEECYFELANIVPLYNKIRNYITQKPYSDEKFKLNFENSTLANGWDKNKEPDNTAILFIKDDKYYLGVMNKKNNKIFDDKAIKENKGEGYKKIVYKLLPGANKMLPKVFFSAKSIKFYNPSEDILRIRNHSTHTKNGSPQKGYEKFEFNIEDCRKFIDFYKQSISKHPEWKDFGFRFSDTQRYNSIDEFYREVENQGYKLTFENISESYIDSVVNQGKLYLFQIYNKDFSAYSKGRPNLHTLYWKALFDERNLQDVVYKLNGEAELFYRKQSIPKKITHPAKEAIANKNKDNPKKESVFEYDLIKDKRFTEDKFFFHCPITINFKSSGANKFNDEINLLLKEKANDVHILSIDRGERHLAYYTLVDGKGNIIKQDTFNIIGNDRMKTNYHDKLAAIEKDRDSARKDWKKINNIKEMKEGYLSQVVHEIAKLVIEYNAIVVFEDLNFGFKRGRFKVEKQVYQKLEKMLIEKLNYLVFKDNEFDKTGGVLRAYQLTAPFETFKKMGKQTGIIYYVPAGFTSKICPVTGFVNQLYPKYESVSKSQEFFSKFDKICYNLDKGYFEFSFDYKNFGDKAAKGKWTIASFGSRLINFRNSDKNHNWDTREVYPTKELEKLLKDYSIEYGHGECIKAAICGESDKKFFAKLTSVLNTILQMRNSKTGTELDYLISPVADVNGNFFDSRQAPKNMPQDADANGAYHIGLKGLMLLGRIKNNQEGKKLNLVIKNEEYFEFVQNRNN

SEQ ID NO: 394 - protein, 1082 aa, Geobacillus thermodenitrificans; identical to SEQ ID NO: 357

SEQ ID NO: 395 - protein, 887 aa, Natronobacterium gregoryi
MTVIDLDSTTTADELTSGHTYDISVTLTGVYDNTDEQHPRMSLAFEQDNGERRYITLWKNTTPKDVFTYDYATGSTYIFTNIDYEVKDGYENLTATYQTTVENATAQEVGTTDEDETFAGGEPLDHHLDDALNETPDDAETESDSGHVMTSFASRDQLPEWTLHTYTLTATDGAKTDTEYARRTLAYTVRQELYTDHDAAPVATDGLMLLTPEPLGETPLDLDCGVRVEADETRTLDYTTAKDRLLARELVEEGLKRSLWDDYLVRGIDEVLSKEPVLTCDEFDLHERYDLSVEVGHSGRAYLHINFRHRFVPKLTLADIDDDNIYPGLRVKTTYRPRRGHIVWGLRDECATDSLNTLGNQSVVAYHRNNQTPINTDLLDAIEAADRRVVETRRQGHGDDAVSFPQELLAVEPNTHQIKQFASDGFHQQARSKTRLSASRCSEKAQAFAERLDPVRLNGSTVEFSSEFFTGNNEQQLRLLYENGESVLTFRDGARGAHPDETFSKGIVNPPESFEVAVVLPEQQADTCKAQWDTMADLLNQAGAPPTRSETVQYDAFSSPESISLNVAGAIDPSEVDAAFVVLPPDQEGFADLASPTETYDELKKALANMGIYSQMAYFDRFRDAKIFYTRNVALGLLAAAGGVAFTTEHAMPGDADMFIGIDVSRSYPEDGASGQINIAATATAVYKDGTILGHSSTRPQLGEKLQSTDVRDIMKNAILGYQQVTGESPTHIVIHRDGFMNEDLDPATEFLNEQGVEYDIVEIRKQPQTRLLAVSDVQYDTPVKSIAAINQNEPRATVATFGAPEYLATRDGGGLPRPIQIERVAGETDIETLTRQVYLLSQSHIQVHNSTARLPITTAYADQASTHATKGYLVQTGAFESNVGFL

SEQ ID NO: 396 - protein, 1387 aa, Artificial Sequence
  Synthetic
DYKVYDVRKMIAKSEQEIGKATAKYFFYSNIMNFFKTEITLANGEIRKRPLIETNGETGEIVWDKGRDFATVRKVLSMPQVNIVKKTEVQTGGFSKESILPKRNSDKLIARKKDWDPKKYGGFDSPTVAYSVLVVAKVEKGKSKKLKSVKELLGITIMERSSFEKNPIDFLEAKGYKEVKKDLIIKLPKYSLFELENGRKRMLASAGELQKGNELALPSKYVNFLYLASHYEKLKGSPEDNEQKQLFVEQHKHYLDEIIEQISEFSKRVILADANLDKVLSAYNKHRDKPIREQAENIIHLFTLTNLGAPAAFKYFDTTIDRKRYTSTKEVLDATLIHQSITGLYETRIDLSQLGGDGGSGGSGGSGGSGGSGGSGGDKKYSIGLAIGTNSVGWAVITDEYKVPSKKFKVLGNTDRHSIKKNLIGALLFDSGETAEATRLKRTARRRYTRRKNRICYLQEIFSNEMAKVDDSFFHRLEESFLVEEDKKHERHPIFGNIVDEVAYHEKYPTIYHLRKKLVDSTDKADLRLIYLALAHMIKFRGHFLIEGDLNPDNSDVDKLFIQLVQTYNQLFEENPINASGVDAKAILSARLSKSRRLENLIAQLPGEKKNGLFGNLIALSLGLTPNFKSNFDLAEDAKLQLSKDTYDDDLDNLLAQIGDQYADLFLAAKNLSDAILLSDILRVNTEITKAPLSASMIKRYDEHHQDLTLLKALVRQQLPEKYKEIFFDQSKNGYAGYIDGGASQEEFYKFIKPILEKMDGTEELLVKLNREDLLRKQRTFDNGSIPHQIHLGELHAILRRQEDFYPFLKDNREKIEKILTFRIPYYVGPLARGNSRFAWMTRKSEETITPWNFEEVVDKGASAQSFIERMTNFDKNLPNEKVLPKHSLLYEYFTVYNELTKVKYVTEGMRKPAFLSGEQKKAIVDLLFKTNRKVTVKQLKEDYFKKIECFDSVEISGVEDRFNASLGTYHDLLKIIKDKDFLDNEENEDILEDIVLTLTLFEDREMIEERLKTYAHLFDDKVMKQLKRRRYTGWGRLSRKLINGIRDKQSGKTILDFLKSDGFANRNFMQLIHDDSLTFKEDIQKAQVSGQGDSLHEHIANLAGSPAIKKGILQTVKVVDELVKVMGRHKPENIVIEMARENQTTQKGQKNSRERMKRIEEGIKELGSQILKEHPVENTQLQNEKLYLYYLQNGRDMYVDQELDINRLSDYDVDHIVPQSFLKDDSIDNKVLTRSDKNRGKSDNVPSEEVVKKMKNYWRQLLNAKLITQRKFDNLTKAERGGLSELDKAGFIKRQLVETRQITKHVAQILDSRMNTKYDENDKLIREVKVITLKSKLVSDFRKDFQFYKVREINNYHHAHDAYLNAVVGTALIKKYPKLESEFVYG

SEQ ID NO: 397 - protein, 1388 aa, Artificial Sequence
  Synthetic
EIGKATAKYFFYSNIMNFFKTEITLANGEIRKRPLIETNGETGEIVWDKGRDFATVRKVLSMPQVNIVKKTEVQTGGFSKESILPKRNSDKLIARKKDWDPKKYGGFDSPTVAYSVLVVAKVEKGKSKKLKSVKELLGITIMERSSFEKNPIDFLEAKGYKEVKKDLIIKLPKYSLFELENGRKRMLASAGELQKGNELALPSKYVNFLYLASHYEKLKGSPEDNEQKQLFVEQHKHYLDEIIEQISEFSKRVILADANLDKVLSAYNKHRDKPIREQAENIIHLFTLTNLGAPAAFKYFDTTIDRKRYTSTKEVLDATLIHQSITGLYETRIDLSQLGGDGGSGGSGGSGGSGGSGGSGGMDKKYSIGLAIGTNSVGWAVITDEYKVPSKKFKVLGNTDRHSIKKNLIGALLFDSGETAEATRLKRTARRRYTRRKNRICYLQEIFSNEMAKVDDSFFHRLEESFLVEEDKKHERHPIFGNIVDEVAYHEKYPTIYHLRKKLVDSTDKADLRLIYLALAHMIKFRGHFLIEGDLNPDNSDVDKLFIQLVQTYNQLFEENPINASGVDAKAILSARLSKSRRLENLIAQLPGEKKNGLFGNLIALSLGLTPNFKSNFDLAEDAKLQLSKDTYDDDLDNLLAQIGDQYADLFLAAKNLSDAILLSDILRVNTEITKAPLSASMIKRYDEHHQDLTLLKALVRQQLPEKYKEIFFDQSKNGYAGYIDGGASQEEFYKFIKPILEKMDGTEELLVKLNREDLLRKQRTFDNGSIPHQIHLGELHAILRRQEDFYPFLKDNREKIEKILTFRIPYYVGPLARGNSRFAWMTRKSEETITPWNFEEVVDKGASAQSFIERMTNFDKNLPNEKVLPKHSLLYEYFTVYNELTKVKYVTEGMRKPAFLSGEQKKAIVDLLFKTNRKVTVKQLKEDYFKKIECFDSVEISGVEDRFNASLGTYHDLLKIIKDKDFLDNEENEDILEDIVLTLTLFEDREMIEERLKTYAHLFDDKVMKQLKRRRYTGWGRLSRKLINGIRDKQSGKTILDFLKSDGFANRNFMQLIHDDSLTFKEDIQKAQVSGQGDSLHEHIANLAGSPAIKKGILQTVKVVDELVKVMGRHKPENIVIEMARENQTTQKGQKNSRERMKRIEEGIKELGSQILKEHPVENTQLQNEKLYLYYLQNGRDMYVDQELDINRLSDYDVDHIVPQSFLKDDSIDNKVLTRSDKNRGKSDNVPSEEVVKKMKNYWRQLLNAKLITQRKFDNLTKAERGGLSELDKAGFIKRQLVETRQITKHVAQILDSRMNTKYDENDKLIREVKVITLKSKLVSDFRKDFQFYKVREINNYHHAHDAYLNAVVGTALIKKYPKLESEFVYGDYKVYDVRKMIAKSEQ

SEQ ID NO: 398 - protein, 1387 aa, Artificial Sequence
  Synthetic
NIMNFFKTEITLANGEIRKRPLIETNGETGEIVWDKGRDFATVRKVLSMPQVNIVKKTEVQTGGFSKESILPKRNSDKLIARKKDWDPKKYGGFDSPTVAYSVLVVAKVEKGKSKKLKSVKELLGITIMERSSFEKNPIDFLEAKGYKEVKKDLIIKLPKYSLFELENGRKRMLASAGELQKGNELALPSKYVNFLYLASHYEKLKGSPEDNEQKQLFVEQHKHYLDEIIEQISEFSKRVILADANLDKVLSAYNKHRDKPIREQAENIIHLFTLTNLGAPAAFKYFDTTIDRKRYTSTKEVLDATLIHQSITGLYETRIDLSQLGGDGGSGGSGGSGGSGGSGGSGGDKKYSIGLAIGTNSVGWAVITDEYKVPSKKFKVLGNTDRHSIKKNLIGALLFDSGETAEATRLKRTARRRYTRRKNRICYLQEIFSNEMAKVDDSFFHRLEESFLVEEDKKHERHPIFGNIVDEVAYHEKYPTIYHLRKKLVDSTDKADLRLIYLALAHMIKFRGHFLIEGDLNPDNSDVDKLFIQLVQTYNQLFEENPINASGVDAKAILSARLSKSRRLENLIAQLPGEKKNGLFGNLIALSLGLTPNFKSNFDLAEDAKLQLSKDTYDDDLDNLLAQIGDQYADLFLAAKNLSDAILLSDILRVNTEITKAPLSASMIKRYDEHHQDLTLLKALVRQQLPEKYKEIFFDQSKNGYAGYIDGGASQEEFYKFIKPILEKMDGTEELLVKLNREDLLRKQRTFDNGSIPHQIHLGELHAILRRQEDFYPFLKDNREKIEKILTFRIPYYVGPLARGNSRFAWMTRKSEETITPWNFEEVVDKGASAQSFIERMTNFDKNLPNEKVLPKHSLLYEYFTVYNELTKVKYVTEGMRKPAFLSGEQKKAIVDLLFKTNRKVTVKQLKEDYFKKIECFDSVEISGVEDRFNASLGTYHDLLKIIKDKDFLDNEENEDILEDIVLTLTLFEDREMIEERLKTYAHLFDDKVMKQLKRRRYTGWGRLSRKLINGIRDKQSGKTILDFLKSDGFANRNFMQLIHDDSLTFKEDIQKAQVSGQGDSLHEHIANLAGSPAIKKGILQTVKVVDELVKVMGRHKPENIVIEMARENQTTQKGQKNSRERMKRIEEGIKELGSQILKEHPVENTQLQNEKLYLYYLQNGRDMYVDQELDINRLSDYDVDHIVPQSFLKDDSIDNKVLTRSDKNRGKSDNVPSEEVVKKMKNYWRQLLNAKLITQRKFDNLTKAERGGLSELDKAGFIKRQLVETRQITKHVAQILDSRMNTKYDENDKLIREVKVITLKSKLVSDFRKDFQFYKVREINNYHHAHDAYLNAVVGTALIKKYPKLESEFVYGDYKVYDVRKMIAKSEQEIGKATAKYFFYS

SEQ ID NO: 399 - protein, 1388 aa, Artificial Sequence
  Synthetic
PEDNEQKQLFVEQHKHYLDEIIEQISEFSKRVILADANLDKVLSAYNKHRDKPIREQAENIIHLFTLTNLGAPAAFKYFDTTIDRKRYTSTKEVLDATLIHQSITGLYETRIDLSQLGGDGGSGGSGGSGGSGGSGGSGGMDKKYSIGLAIGTNSVGWAVITDEYKVPSKKFKVLGNTDRHSIKKNLIGALLFDSGETAEATRLKRTARRRYTRRKNRICYLQEIFSNEMAKVDDSFFHRLEESFLVEEDKKHERHPIFGNIVDEVAYHEKYPTIYHLRKKLVDSTDKADLRLIYLALAHMIKFRGHFLIEGDLNPDNSDVDKLFIQLVQTYNQLFEENPINASGVDAKAILSARLSKSRRLENLIAQLPGEKKNGLFGNLIALSLGLTPNFKSNFDLAEDAKLQLSKDTYDDDLDNLLAQIGDQYADLFLAAKNLSDAILLSDILRVNTEITKAPLSASMIKRYDEHHQDLTLLKALVRQQLPEKYKEIFFDQSKNGYAGYIDGGASQEEFYKFIKPILEKMDGTEELLVKLNREDLLRKQRTFDNGSIPHQIHLGELHAILRRQEDFYPFLKDNREKIEKILTFRIPYYVGPLARGNSRFAWMTRKSEETITPWNFEEVVDKGASAQSFIERMTNFDKNLPNEKVLPKHSLLYEYFTVYNELTKVKYVTEGMRKPAFLSGEQKKAIVDLLFKTNRKVTVKQLKEDYFKKIECFDSVEISGVEDRFNASLGTYHDLLKIIKDKDFLDNEENEDILEDIVLTLTLFEDREMIEERLKTYAHLFDDKVMKQLKRRRYTGWGRLSRKLINGIRDKQSGKTILDFLKSDGFANRNFMQLIHDDSLTFKEDIQKAQVSGQGDSLHEHIANLAGSPAIKKGILQTVKVVDELVKVMGRHKPENIVIEMARENQTTQKGQKNSRERMKRIEEGIKELGSQILKEHPVENTQLQNEKLYLYYLQNGRDMYVDQELDINRLSDYDVDHIVPQSFLKDDSIDNKVLTRSDKNRGKSDNVPSEEVVKKMKNYWRQLLNAKLITQRKFDNLTKAERGGLSELDKAGFIKRQLVETRQITKHVAQILDSRMNTKYDENDKLIREVKVITLKSKLVSDFRKDFQFYKVREINNYHHAHDAYLNAVVGTALIKKYPKLESEFVYGDYKVYDVRKMIAKSEQEIGKATAKYFFYSNIMNFFKTEITLANGEIRKRPLIETNGETGEIVWDKGRDFATVRKVLSMPQVNIVKKTEVQTGGFSKESILPKRNSDKLIARKKDWDPKKYGGFDSPTVAYSVLVVAKVEKGKSKKLKSVKELLGITIMERSSFEKNPIDFLEAKGYKEVKKDLIIKLPKYSLFELENGRKRMLASAGELQKGNELALPSKYVNFLYLASHYEKLKGS

SEQ ID NO: 400 - protein, 1387 aa, Artificial Sequence
  Synthetic
KPIREQAENIIHLFTLTNLGAPAAFKYFDTTIDRKRYTSTKEVLDATLIHQSITGLYETRIDLSQLGGDGGSGGSGGSGGSGGSGGSGGDKKYSIGLAIGTNSVGWAVITDEYKVPSKKFKVLGNTDRHSIKKNLIGALLFDSGETAEATRLKRTARRRYTRRKNRICYLQEIFSNEMAKVDDSFFHRLEESFLVEEDKKHERHPIFGNIVDEVAYHEKYPTIYHLRKKLVDSTDKADLRLIYLALAHMIKFRGHFLIEGDLNPDNSDVDKLFIQLVQTYNQLFEENPINASGVDAKAILSARLSKSRRLENLIAQLPGEKKNGLFGNLIALSLGLTPNFKSNFDLAEDAKLQLSKDTYDDDLDNLLAQIGDQYADLFLAAKNLSDAILLSDILRVNTEITKAPLSASMIKRYDEHHQDLTLLKALVRQQLPEKYKEIFFDQSKNGYAGYIDGGASQEEFYKFIKPILEKMDGTEELLVKLNREDLLRKQRTFDNGSIPHQIHLGELHAILRRQEDFYPFLKDNREKIEKILTFRIPYYVGPLARGNSRFAWMTRKSEETITPWNFEEVVDKGASAQSFIERMTNFDKNLPNEKVLPKHSLLYEYFTVYNELTKVKYVTEGMRKPAFLSGEQKKAIVDLLFKTNRKVTVKQLKEDYFKKIECFDSVEISGVEDRFNASLGTYHDLLKIIKDKDFLDNEENEDILEDIVLTLTLFEDREMIEERLKTYAHLFDDKVMKQLKRRRYTGWGRLSRKLINGIRDKQSGKTILDFLKSDGFANRNFMQLIHDDSLTFKEDIQKAQVSGQGDSLHEHIANLAGSPAIKKGILQTVKVVDELVKVMGRHKPENIVIEMARENQTTQKGQKNSRERMKRIEEGIKELGSQILKEHPVENTQLQNEKLYLYYLQNGRDMYVDQELDINRLSDYDVDHIVPQSFLKDDSIDNKVLTRSDKNRGKSDNVPSEEVVKKMKNYWRQLLNAKLITQRKFDNLTKAERGGLSELDKAGFIKRQLVETRQITKHVAQILDSRMNTKYDENDKLIREVKVITLKSKLVSDFRKDFQFYKVREINNYHHAHDAYLNAVVGTALIKKYPKLESEFVYGDYKVYDVRKMIAKSEQEIGKATAKYFFYSNIMNFFKTEITLANGEIRKRPLIETNGETGEIVWDKGRDFATVRKVLSMPQVNIVKKTEVQTGGFSKESILPKRNSDKLIARKKDWDPKKYGGFDSPTVAYSVLVVAKVEKGKSKKLKSVKELLGITIMERSSFEKNPIDFLEAKGYKEVKKDLIIKLPKYSLFELENGRKRMLASAGELQKGNELALPSKYVNFLYLASHYEKLKGSPEDNEQKQLFVEQHKHYLDEIIEQISEFSKRVILADANLDKVLSAYNKHRD

SEQ ID NO: 401 - protein, 357 aa, Artificial Sequence
  Synthetic
DYKVYDVRKMIAKSEQEIGKATAKYFFYSNIMNFFKTEITLANGEIRKRPLIETNGETGEIVWDKGRDFATVRKVLSMPQVNIVKKTEVQTGGFSKESILPKRNSDKLIARKKDWDPKKYGGFDSPTVAYSVLVVAKVEKGKSKKLKSVKELLGITIMERSSFEKNPIDFLEAKGYKEVKKDLIIKLPKYSLFELENGRKRMLASAGELQKGNELALPSKYVNFLYLASHYEKLKGSPEDNEQKQLFVEQHKHYLDEIIEQISEFSKRVILADANLDKVLSAYNKHRDKPIREQAENIIHLFTLTNLGAPAAFKYFDTTIDRKRYTSTKEVLDATLIHQSITGLYETRIDLSQLGGD

SEQ ID NO: 402 - protein, 341 aa, Artificial Sequence
  Synthetic
EIGKATAKYFFYSNIMNFFKTEITLANGEIRKRPLIETNGETGEIVWDKGRDFATVRKVLSMPQVNIVKKTEVQTGGFSKESILPKRNSDKLIARKKDWDPKKYGGFDSPTVAYSVLVVAKVEKGKSKKLKSVKELLGITIMERSSFEKNPIDFLEAKGYKEVKKDLIIKLPKYSLFELENGRKRMLASAGELQKGNELALPSKYVNFLYLASHYEKLKGSPEDNEQKQLFVEQHKHYLDEIIEQISEFSKRVILADANLDKVLSAYNKHRDKPIREQAENIIHLFTLTNLGAPAAFKYFDTTIDRKRYTSTKEVLDATLIHQSITGLYETRIDLSQLGGD

SEQ ID NO: 403 - protein, 328 aa, Artificial Sequence
  Synthetic
NIMNFFKTEITLANGEIRKRPLIETNGETGEIVWDKGRDFATVRKVLSMPQVNIVKKTEVQTGGFSKESILPKRNSDKLIARKKDWDPKKYGGFDSPTVAYSVLVVAKVEKGKSKKLKSVKELLGITIMERSSFEKNPIDFLEAKGYKEVKKDLIIKLPKYSLFELENGRKRMLASAGELQKGNELALPSKYVNFLYLASHYEKLKGSPEDNEQKQLFVEQHKHYLDEIIEQISEFSKRVILADANLDKVLSAYNKHRDKPIREQAENIIHLFTLTNLGAPAAFKYFDTTIDRKRYTSTKEVLDATLIHQSITGLYETRIDLSQLGGD

SEQ ID NO: 404 - protein, 120 aa, Artificial Sequence
  Synthetic
PEDNEQKQLFVEQHKHYLDEIIEQISEFSKRVILADANLDKVLSAYNKHRDKPIREQAENIIHLFTLTNLGAPAAFKYFDTTIDRKRYTSTKEVLDATLIHQSITGLYETRIDLSQLGGD

SEQ ID NO: 405 - protein, 69 aa, Artificial Sequence
  Synthetic
KPIREQAENIIHLFTLTNLGAPAAFKYFDTTIDRKRYTSTKEVLDATLIHQSITGLYETRIDLSQLGGD

SEQ ID NO: 406 - protein, 1367 aa, Artificial Sequence
  Synthetic
DKKYSIGLDIGTNSVGWAVITDEYKVPSKKFKVLGNTDRHSIKKNLIGALLFDSGETAEATRLKRTARRRYTRRKNRICYLQEIFSNEMAKVDDSFFHRLEESFLVEEDKKHERHPIFGNIVDEVAYHEKYPTIYHLRKKLVDSTDKADLRLIYLALAHMIKFRGHFLIEGDLNPDNSDVDKLFIQLVQTYNQLFEENPINASGVDAKAILSARLSKSRRLENLIAQLPGEKKNGLFGNLIALSLGLTPNFKSNFDLAEDAKLQLSKDTYDDDLDNLLAQIGDQYADLFLAAKNLSDAILLSDILRVNTEITKAPLSASMIKRYDEHHQDLTLLKALVRQQLPEKYKEIFFDQSKNGYAGYIDGGASQEEFYKFIKPILEKMDGTEELLVKLNREDLLRKQRTFDNGSIPHQIHLGELHAILRRQEDFYPFLKDNREKIEKILTFRIPYYVGPLARGNSRFAWMTRKSEETITPWNFEEVVDKGASAQSFIERMTNFDKNLPNEKVLPKHSLLYEYFTVYNELTKVKYVTEGMRKPAFLSGEQKKAIVDLLFKTNRKVTVKQLKEDYFKKIECFDSVEISGVEDRFNASLGTYHDLLKIIKDKDFLDNEENEDILEDIVLTLTLFEDREMIEERLKTYAHLFDDKVMKQLKRRRYTGWGRLSRKLINGIRDKQSGKTILDFLKSDGFANRNFMQLIHDDSLTFKEDIQKAQVSGQGDSLHEHIANLAGSPAIKKGILQTVKVVDELVKVMGRHKPENIVIEMARENQTTQKGQKNSRERMKRIEEGIKELGSQILKEHPVENTQLQNEKLYLYYLQNGRDMYVDQELDINRLSDYDVDAIVPQSFLKDDSIDNKVLTRSDKNRGKSDNVPSEEVVKKMKNYWRQLLNAKLITQRKFDNLTKAERGGLSELDKAGFIKRQLVETRQITKHVAQILDSRMNTKYDENDKLIREVKVITLKSKLVSDFRKDFQFYKVREINNYHHAHDAYLNAVVGTALIKKYPKLESEFVYGDYKVYDVRKMIAKSEQEIGKATAKYFFYSNIMNFFKTEITLANGEIRKRPLIETNGETGEIVWDKGRDFATVRKVLSMPQVNIVKKTEVQTGGFSKESILPKRNSDKLIARKKDWDPKKYGGFVSPTVAYSVLVVAKVEKGKSKKLKSVKELLGITIMERSSFEKNPIDFLEAKGYKEVKKDLIIKLPKYSLFELENGRKRMLASARELQKGNELALPSKYVNFLYLASHYEKLKGSPEDNEQKQLFVEQHKHYLDEIIEQISEFSKRVILADANLDKVLSAYNKHRDKPIREQAENIIHLFTLTNLGAPAAFKYFDTTIDRKQYRSTKEVLDATLIHQSITGLYETRIDLSQLGGD

SEQ ID NO: 407 - protein, 1367 aa, Artificial Sequence
  Synthetic
DKKYSIGLDIGTNSVGWAVITDEYKVPSKKFKVLGNTDRHSIKKNLIGALLFDSGETAEATRLKRTARRRYTRRKNRICYLQEIFSNEMAKVDDSFFHRLEESFLVEEDKKHERHPIFGNIVDEVAYHEKYPTIYHLRKKLVDSTDKADLRLIYLALAHMIKFRGHFLIEGDLNPDNSDVDKLFIQLVQTYNQLFEENPINASGVDAKAILSARLSKSRRLENLIAQLPGEKKNGLFGNLIALSLGLTPNFKSNFDLAEDAKLQLSKDTYDDDLDNLLAQIGDQYADLFLAAKNLSDAILLSDILRVNTEITKAPLSASMIKRYDEHHQDLTLLKALVRQQLPEKYKEIFFDQSKNGYAGYIDGGASQEEFYKFIKPILEKMDGTEELLVKLNREDLLRKQRTFDNGSIPHQIHLGELHAILRRQEDFYPFLKDNREKIEKILTFRIPYYVGPLARGNSRFAWMTRKSEETITPWNFEEVVDKGASAQSFIERMTNFDKNLPNEKVLPKHSLLYEYFTVYNELTKVKYVTEGMRKPAFLSGEQKKAIVDLLFKTNRKVTVKQLKEDYFKKIECFDSVEISGVEDRFNASLGTYHDLLKIIKDKDFLDNEENEDILEDIVLTLTLFEDREMIEERLKTYAHLFDDKVMKQLKRRRYTGWGRLSRKLINGIRDKQSGKTILDFLKSDGFANRNFMQLIHDDSLTFKEDIQKAQVSGQGDSLHEHIANLAGSPAIKKGILQTVKVVDELVKVMGRHKPENIVIEMARENQTTQKGQKNSRERMKRIEEGIKELGSQILKEHPVENTQLQNEKLYLYYLQNGRDMYVDQELDINRLSDYDVDAIVPQSFLKDDSIDNKVLTRSDKNRGKSDNVPSEEVVKKMKNYWRQLLNAKLITQRKFDNLTKAERGGLSELDKAGFIKRQLVETRQITKHVAQILDSRMNTKYDENDKLIREVKVITLKSKLVSDFRKDFQFYKVREINNYHHAHDAYLNAVVGTALIKKYPKLESEFVYGDYKVYDVRKMIAKSEQEIGKATAKYFFYSNIMNFFKTEITLANGEIRKRPLIETNGETGEIVWDKGRDFATVRKVLSMPQVNIVKKTEVQTGGFSKESILPKRNSDKLIARKKDWDPKKYGGFVSPTVAYSVLVVAKVEKGKSKKLKSVKELLGITIMERSSFEKNPIDFLEAKGYKEVKKDLIIKLPKYSLFELENGRKRMLASARELQKGNELALPSKYVNFLYLASHYEKLKGSPEDNEQKQLFVEQHKHYLDEIIEQISEFSKRVILADANLDKVLSAYNKHRDKPIREQAENIIHLFTLTNLGAPAAFKYFDTTIDRKEYRSTKEVLDATLIHQSITGLYETRIDLSQLGGD

SEQ ID NO: 408 - protein, 7 aa, Artificial Sequence
  Synthetic
PKKKRKV

SEQ ID NO: 409 - protein, 30 aa, Artificial Sequence
  Synthetic
MDSLLMNRRKFLYQFKNVRWAKGRRETYLC

SEQ ID NO: 410 - protein, 18 aa, Artificial Sequence
  Synthetic
KRTADGSEFESPKKKRKV

SEQ ID NO: 411 - protein, 17 aa, Artificial Sequence
  Synthetic
KRTADGSEFEPKKKRKV

SEQ ID NO: 412 - protein, 32 aa, Artificial Sequence
  Synthetic
SGGSSGGSSGSETPGTSESATPESSGGSSGGS

SEQ ID NO: 413 - protein, 10 aa, Artificial Sequence
  Synthetic
SGGSGGSGGS

SEQ ID NO: 414 - protein, 4 aa, Artificial Sequence
  Synthetic
SGGS

SEQ ID NO: 415 - protein, 150 aa, Artificial Sequence
  Synthetic
GGGGSGGGGSGGGGSGGGGSGGGGSGGGGSGGGGSGGGGSGGGGSGGGGSGGGGSGGGGSGGGGSGGGGSGGGGSGGGGSGGGGSGGGGSGGGGSGGGGSGGGGSGGGGSGGGGSGGGGSGGGGSGGGGSGGGGSGGGGSGGGGSGGGGS

SEQ ID NO: 416 - protein, 30 aa, Artificial Sequence
  Synthetic
GGGGGGGGGGGGGGGGGGGGGGGGGGGGGG

SEQ ID NO: 417 - protein, 150 aa, Artificial Sequence
  Synthetic
EAAAKEAAAKEAAAKEAAAKEAAAKEAAAKEAAAKEAAAKEAAAKEAAAKEAAAKEAAAKEAAAKEAAAKEAAAKEAAAKEAAAKEAAAKEAAAKEAAAKEAAAKEAAAKEAAAKEAAAKEAAAKEAAAKEAAAKEAAAKEAAAKEAAAK

SEQ ID NO: 418 - protein, 90 aa, Artificial Sequence
  Synthetic
GGSGGSGGSGGSGGSGGSGGSGGSGGSGGSGGSGGSGGSGGSGGSGGSGGSGGSGGSGGSGGSGGSGGSGGSGGSGGSGGSGGSGGSGGS

SEQ ID NO: 419 - protein, 120 aa, Artificial Sequence
  Synthetic
SGGSSGGSSGGSSGGSSGGSSGGSSGGSSGGSSGGSSGGSSGGSSGGSSGGSSGGSSGGSSGGSSGGSSGGSSGGSSGGSSGGSSGGSSGGSSGGSSGGSSGGSSGGSSGGSSGGSSGGS

SEQ ID NO: 420 - protein, 60 aa, Artificial Sequence
  Synthetic
  misc_feature (1)..(1): Xaa can be any naturally occurring amino acid
  misc_feature (3)..(3): Xaa can be any naturally occurring amino acid
  misc_feature (5)..(5): Xaa can be any naturally occurring amino acid
  misc_feature (7)..(7): Xaa can be any naturally occurring amino acid
  misc_feature (9)..(9): Xaa can be any naturally occurring amino acid
  misc_feature (11)..(11): Xaa can be any naturally occurring amino acid
  misc_feature (13)..(13): Xaa can be any naturally occurring amino acid
  misc_feature (15)..(15): Xaa can be any naturally occurring amino acid
  misc_feature (17)..(17): Xaa can be any naturally occurring amino acid
  misc_feature (19)..(19): Xaa can be any naturally occurring amino acid
  misc_feature (21)..(21): Xaa can be any naturally occurring amino acid
  misc_feature (23)..(23): Xaa can be any naturally occurring amino acid
  misc_feature (25)..(25): Xaa can be any naturally occurring amino acid
  misc_feature (27)..(27): Xaa can be any naturally occurring amino acid
  misc_feature (29)..(29): Xaa can be any naturally occurring amino acid
  misc_feature (31)..(31): Xaa can be any naturally occurring amino acid
  misc_feature (33)..(33): Xaa can be any naturally occurring amino acid
  misc_feature (35)..(35): Xaa can be any naturally occurring amino acid
  misc_feature (37)..(37): Xaa can be any naturally occurring amino acid
  misc_feature (39)..(39): Xaa can be any naturally occurring amino acid
  misc_feature (41)..(41): Xaa can be any naturally occurring amino acid
  misc_feature (43)..(43): Xaa can be any naturally occurring amino acid
  misc_feature (45)..(45): Xaa can be any naturally occurring amino acid
  misc_feature (47)..(47): Xaa can be any naturally occurring amino acid
  misc_feature (49)..(49): Xaa can be any naturally occurring amino acid
  misc_feature (51)..(51): Xaa can be any naturally occurring amino acid
  misc_feature (53)..(53): Xaa can be any naturally occurring amino acid
  misc_feature (55)..(55): Xaa can be any naturally occurring amino acid
  misc_feature (57)..(57): Xaa can be any naturally occurring amino acid
  misc_feature (59)..(59): Xaa can be any naturally occurring amino acid
XPXPXPXPXPXPXPXPXPXPXPXPXPXPXPXPXPXPXPXPXPXPXPXPXPXPXPXPXPXP

SEQ ID NO: 421 - protein, 90 aa, Artificial Sequence; identical to SEQ ID NO: 418
  Synthetic

SEQ ID NO: 422 - protein, 16 aa, Artificial Sequence
  Synthetic
SGSETPGTSESATPES

SEQ ID NO: 423 - protein, 24 aa, Artificial Sequence
  Synthetic
SGGSSGSETPGTSESATPESSGGS

SEQ ID NO: 424 - protein, 104 aa, Artificial Sequence
  Synthetic
GGSGGSPGSPAGSPTSTEEGTSESATPESGPGTSTEPSEGSAPGSPAGSPTSTEEGTSTEPSEGSAPGTSTEPSEGSAPGTSESATPESGPGSEPATSGGSGGS

SEQ ID NO: 425 - protein, 24 aa, Artificial Sequence
  Synthetic
SGGSSGGSSGSETPGTSESATPES

SEQ ID NO: 426 - protein, 40 aa, Artificial Sequence
  Synthetic
SGGSSGGSSGSETPGTSESATPESSGGSSGGSSGGSSGGS

SEQ ID NO: 427 - protein, 64 aa, Artificial Sequence
  Synthetic
SGGSSGGSSGSETPGTSESATPESSGGSSGGSSGGSSGGSSGSETPGTSESATPESSGGSSGGS

SEQ ID NO: 428 - protein, 92 aa, Artificial Sequence
  Synthetic
PGSPAGSPTSTEEGTSESATPESGPGTSTEPSEGSAPGSPAGSPTSTEEGTSTEPSEGSAPGTSTEPSEGSAPGTSESATPESGPGSEPATS

SEQ ID NO: 429 - protein, 17 aa, Artificial Sequence
  Synthetic
  misc_feature (9)..(9): Xaa can be any naturally occurring amino acid
SGGSSGGSXSGGSSGGS

SEQ ID NO: 430 - protein, 4 aa, Artificial Sequence
  Synthetic
GGGS

SEQ ID NO: 431 - protein, 5 aa, Artificial Sequence
  Synthetic
SGGGS

SEQ ID NO: 432 - protein, 1 aa, Artificial Sequence
  Synthetic
  misc_feature (1)..(1): Xaa can be any naturally occurring amino acid
X

SEQ ID NO: 433 - DNA, 23 bp, Artificial Sequence
  Synthetic
gttcacacccatgacgaacatgg

SEQ ID NO: 434 - DNA, 117 bp, E. coli
  misc_feature (25)..(26): n is a, c, g, or t
  misc_feature (32)..(32): n is a, c, g, or t
  misc_feature (49)..(49): n is a, c, g, or t
  misc_feature (76)..(76): n is a, c, g, or t
  misc_feature (86)..(86): n is a, c, g, or t
  misc_feature (88)..(88): n is a, c, g, or t
  misc_feature (92)..(92): n is a, c, g, or t
  misc_feature (110)..(110): n is a, c, g, or t
  misc_feature (117)..(117): n is a, c, g, or t
svshywmrhatakrardrvvgavvnnrvggwnraghdtahamarggvmnyrdatyvtcvmcagamhsrgrvvgwrnskrgaagsmnvnygmnhrvtgadcaacdyrmrvnakkassn

SEQ ID NO: 435 - protein, 1368 aa, Artificial Sequence
  Synthetic
MDKKYSIGLDIGTNSVGWAVITDEYKVPSKKFKVLGNTDRHSIKKNLIGALLFDSGETAEATRLKRTARRRYTRRKNRICYLQEIFSNEMAKVDDSFFHRLEESFLVEEDKKHERHPIFGNIVDEVAYHEKYPTIYHLRKKLVDSTDKADLRLIYLALAHMIKFRGHFLIEGDLNPDNSDVDKLFIQLVQTYNQLFEENPINASGVDAKAILSARLSKSRRLENLIAQLPGEKKNGLFGNLIALSLGLTPNFKSNFDLAEDAKLQLSKDTYDDDLDNLLAQIGDQYADLFLAAKNLSDAILLSDILRVNTEITKAPLSASMVKRYDEHHQDLTLLKALVRQQLPEKYKEIFFDQSKNGYAGYIDGGASQEEFYKFIKPILEKMDGTEELLVKLNREDLLRKQRTFDNGIIPHQIHLGELHAILRRQGDFYPFLKDNREKIEKILTFRIPYYVGPLARGNSRFAWMTRKSEETITPWNFEEVVDKGASAQSFIERMTNFDKNLPNEKVLPKHSLLYEYFTVYNELTKVKYVTEGMRKPAFLSGEQKKAIVDLLFKTNRKVTVKQLKEDYFKKIECFDSVEISGVEDRFNASLGTYHDLLKIIKDKDFLDNEENEDILEDIVLTLTLFEDREMIEERLKTYAHLFDDKVMKQLKRLRYTGWGRLSRKLINGIRDKQSGKTILDFLKSDGFANRNFMQLIHDDSLTFKEDIQKAQVSGQGDSLHEHIANLAGSPAIKKGILQTVKVVDELVKVMGGHKPENIVIEMARENQTTQKGQKNSRERMKRIEEGIKELGSQILKEHPVENTQLQNEKLYLYYLQNGRDMYVDQELDINRLSDYDVDHIVPQSFLKDDSIDNKVLTRSDKNRGKSDNVPSEEVVKKMKNYWRQLLNAKLITQRKFDNLTKAERGGLSELDKAGFIKRQLVETRQITKHVAQILDSRMNTKYDENDKLIREVKVITLKSKLVSDFRKDFQFYKVREINNYHHAHDAYLNAVVGTALIKKYPKLESEFVYGDYKVYDVRKMIAKSEQEIGKATAKYFFYSNIMNFFKTEITLANGEIRKRPLIETNGETGEIVWDKGRDFATVRKVLSMPQVNIVKKTEVQTGGFSKESILPKGNSDKLIARKKDWDPKKYGGFNSPTAAYSVLVVAKVEKGKSKKLKSVKELLGITIMERSSFEKNPIGFLEAKGYKEVKKDLIIKLPKYSLFELENGRKRMLASAGVLHKGNELALPSKYVNFLYLASHYEKLKGSPEDNEQKQLFVEQHKHYLDEIIEQISEFSKRVILADANLDKVLSAYNKHRDKPIREQAENIIHLFTLTNLGVPAAFKYFDTTIDKKRYTSTKEVLDATLIHQSITGLYETRIDLSQLGGD

SEQ ID NO: 436 - protein, 1368 aa, Artificial Sequence
  Synthetic
MDKKYSIGLDIGTNSVGWAVITDEYKVPSKKFKVLGNTDRHSIKKNLIGALLFDSGETAEATRLKRTARRRYTRRKNRICYLQEIFSNEMAKVDDSFFHRLEESFLVEEDKKHERHPIFGNIVDEVAYHEKYPTIYHLRKKLVDSTDKADLRLIYLALAHMIKFRGHFLIEGDLNPDNSDVDKLFIQLVQTYNQLFEENPINASGVDAKAILSARLSKSRRLENLIAQLPGEKKNGLFGNLIALSLGLTPNFKSNFDLAEDAKLQLSKDTYDDDLDNLLAQIGDQYADLFLAAKNLSDAILLSDILRVNTEITKAPLSASMVKRYDEHHQDLTLLKALVRQQLPEKYKEIFFDQSKNGYAGYIDGGASQEEFYKFIKPILEKMDGTEELLVKLNREDLLRKQRTFDNGIIPHQIHLGELHAILRRQGDFYPFLKDNREKIEKILTFRIPYYVGPLARGNSRFAWMTRKSEETITPWNFEEVVDKGASAQSFIERMTNFDKNLPNEKVLPKHSLLYEYFTVYNELTKVKYVTEGMRKPAFLSGEQKKAIVDLLFKTNRKVTVKQLKEDYFKKIECFDSVEISGVEDRFNASLGTYHDLLKIIKDKDFLDNEENEDILEDIVLTLTLFEDREMIEERLKTYAHLFDDKVMKQLKRLRYTGWGRLSRKLINGIRDKQSGKTILDFLKSDGFANRNFMQLIHDDSLTFKEDIQKAQVSGQGDSLHEHIANLAGSPAIKKGILQTVKVVDELVKVMGGHKPENIVIEMARENQTTQKGQKNSRERMKRIEEGIKELGSQILKEHPVENTQLQNEKLYLYYLQNGRDMYVDQELDINRLSDYDVDHIVPQSFLKDDSIDNKVLTRSDKNRGKSDNVPSEEVVKKMKNYWRQLLNAKLITQRKFDNLTKAERGGLSELDKAGFIKRQLVETRQITKHVAQILDSRMNTKYDENDKLIREVKVITLKSKLVSDFRKDFQFYKVREINNYHHAHDAYLNAVVGTALIKKYPKLESEFVYGDYKVYDVRKMIAKSEQEIGKATAKYFFYSNIMNFFKTEITLANGEIRKRPLIETNGETGEIVWDKGRDFATVRKVLSMPQVNIVKKTEVQTGGFSKESILPKGNSDKLIARKKDWDPKKYGGFNSPTVAYSVLVVAKVEKGKSKKLKSVKELLGITIMERSSFEKNPIDFLEAKGYKEVKKDLIIKLPKYSLFELENGRKRMLASAGVLQKGNELALPSKYVNFLYLASHYEKLKGSPEDNEQKQLFVEQHKHYLDEIIEQISEFSKRVILADANLDKVLSAYNKHRDKPIREQAENIIHLFTLTNLGAPAAFKYFDTTINRKQYNTTKEVLDATLIRQSITGLYETRIDLSQLGGD

SEQ ID NO: 437 - protein, 1368 aa, Artificial Sequence
  Synthetic
MDKKYSIGLDIGTNSVGWAVITDEYKVPSKKFKVLGNTDRHSIKKNLIGALLFDSGETAEATRLKRTARRRYTRRKNRICYLQEIFSNEMAKVDDSFFHRLEESFLVEEDKKHERHPIFGNIVDEVAYHEKYPTIYHLRKKLVDSTDKADLRLIYLALAHMIKFRGHFLIEGDLNPDNSDVDKLFIQLVQTYNQLFEENPINASGVDAKAILSARLSKSRRLENLIAQLPGEKKNGLFGNLIALSLGLTPNFKSNFDLAEDAKLQLSKDTYDDDLDNLLAQIGDQYADLFLAAKNLSDAILLSDILRVNTEITKAPLSASMVKRYDEHHQDLTLLKALVRQQLPEKYKEIFFDQSKNGYAGYIDGGASQEEFYKFIKPILEKMDGTEELLVKLNREDLLRKQRTFDNGIIPHQIHLGELHAILRRQGDFYPFLKDNREKIEKILTFRIPYYVGPLARGNSRFAWMTRKSEETITPWNFEEVVDKGASAQSFIERMTNFDKNLPNEKVLPKHSLLYEYFTVYNELTKVKYVTEGMRKPAFLSGEQKKAIVDLLFKTNRKVTVKQLKEDYFKKIECFDSVEISGVEDRFNASLGTYHDLLKIIKDKDFLDNEENEDILEDIVLTLTLFEDREMIEERLKTYAHLFDDKVMKQLKRLRYTGWGRLSRKLINGIRDKQSGKTILDFLKSDGFANRNFMQLIHDDSLTFKEDIQKAQVSGQGDSLHEHIANLAGSPAIKKGILQTVKVVDELVKVMGGHKPENIVIEMARENQTTQKGQKNSRERMKRIEEGIKELGSQILKEHPVENTQLQNEKLYLYYLQNGRDMYVDQELDINRLSDYDVDHIVPQSFLKDDSIDNKVLTRSDKNRGKSDNVPSEEVVKKMKNYWRQLLNAKLITQRKFDNLTKAERGGLSELDKAGFIKRQLVETRQITKHVAQILDSRMNTKYDENDKLIREVKVITLKSKLVSDFRKDFQFYKVREINNYHHAHDAYLNAVVGTALIKKYPKLESEFVYGDYKVYDVRKMIAKSEQEIGKATAKYFFYSNIMNFFKTEITLANGEIRKRPLIETNGETGEIVWDKGRDFATVRKVLSMPQVNIVKKTEVQTGGFSKESILPKGNSDKLIARKKDWDPKKYGGFNSPTVAYSVLVVAKVEKGKSKKLKSVKELLGITIMERSSFEKNPIGFLEAKGYKEVKKDLIIKLPKYSLFELENGRKRMLASASVLHKGNELALPSKYVNFLYLASHYEKLKGSSEDNKQKQLFVEQHKHYLDEIIEQISEFSKRVILADANLDKVLSAYNKHRDKPIREQAENIIHLFTLTNLGASAAFKYFDTTIGRKLYTSTKEVLDATLIHQSITGLYETRIDLSQLGGD

SEQ ID NO: 438 - protein, 1053 aa, Staphylococcus aureus
MGKRNYILGLAIGITSVGYGIIDYETRDVIDAGVRLFKEANVENNEGRRSKRGARRLKRRRRHRIQRVKKLLFDYNLLTDHSELSGINPYEARVKGLSQKLSEEEFSAALLHLAKRRGVHNVNEVEEDTGNELSTKEQISRNSKALEEKYVAELQLERLKKDGEVRGSINRFKTSDYVKEAKQLLKVQKAYHQLDQSFIDTYIDLLETRRTYYEGPGEGSPFGWKDIKEWYEMLMGHCTYFPEELRSVKYAYNADLYNALNDLNNLVITRDENEKLEYYEKFQIIENVFKQKKKPTLKQIAKEILVNEEDIKGYRVTSTGKPEFTNLKVYHDIKDITARKEIIENAELLDQIAKILTIYQSSEDIQEELTNLNSELTQEEIEQISNLKGYTGTHNLSLKAINLILDELWHTNDNQIAIFNRLKLVPKKVDLSQQKEIPTTLVDDFILSPVVKRSFIQSIKVINAIIKKYGLPNDIIIELAREKNSKDAQKMINEMQKRNRQTNERIEEIIRTTGKENAKYLIEKIKLHDMQEGKCLYSLEAIPLEDLLNNPFNYEVDHIIPRSVSFDNSFNNKVLVKQEENSKKGNRTPFQYLSSSDSKISYETFKKHILNLAKGKGRISKTKKEYLLEERDINRFSVQKDFINRNLVDTRYATRGLMNLLRSYFRVNNLDVKVKSINGGFTSFLRRKWKFKKERNKGYKHHAEDALIIANADFIFKEWKKLDKAKKVMENQMFEEKQAESMPEIETEQEYKEIFITPHQIKHIKDFKDYKYSHRVDKKPNRKLINDTLYSTRKDDKGNTLIVNNLNGLYDKDNDKLKKLINKSPEKLLMYHHDPQTYQKLKLIMEQYGDEKNPLYKYYEETGNYLTKYSKKDNGPVIKKIKYYGNKLNAHLDITDDYPNSRNKVVKLSLKPYRFDVYLDNGVYKFVTVKNLDVIKKENYYEVNSKCYEEAKKLKKISNQAEFIASFYKNDLIKINGELYRVIGVNNDLLNRIEVNMIDITYREYLENMNDKRPPHIIKTIASKTQSIKKYSTDILGNLYEVKSKKHPQIIKK

SEQ ID NO: 439 - protein, 1359 aa, Artificial Sequence
  Synthetic
DKKYSIGLDIGTNSVGWAVITDEYKVPSKKFKVLGNTDRHSIKKNLIGALLFDSGETAEATRLKRTARRRYTRRKNRICYLQEIFSNEMAKVDDSFFHRLEESFLVEEDKKHERHPIFGNIVDEVAYHEKYPTIYHLRKKLVDSTDKADLRLIYLALAHMIKFRGHFLIEGDLNPDNSDVDKLFIQLVQTYNQLFEENPINASGVDAKAILSARLSKSRKLENLIAQLPGEKKNGLFGNLIALSLGLTPNFKSNFDLAEDAKLQLSKDTYDDDLDNLLAQIGDQYADLFLAAKNLSDAILLSDILRVNTEITKAPLSASMIKRYDEHHQDLTLLKALVRQQLPEKYKEIFFDQSKNGYAGYIDGGASQEEFYKFIKPILEKMDGTEELLVKLKREDLLRKQRTFDNGSIPHQIHLGELHAILRRQEDFYPFLKDNREKIEKILTFRIPYYVGPLARGNSRFAWMTRKSEETITPWNFEEVVDKGASAQSFIERMTNFDKNLPNEKVLPKHSLLYEYFTVYNELTKVKYVTEGMRKPAFLSGEQKKAIVDLLFKTNRKVTVKQLKEDYFKKIECFDSVEISGVEDRFNASLGTYHDLLKIIKDKDFLDNEENEDILEDIVLTLTLFEDREMIEERLKTYAHLFDDKVMKQLKRRRYTGWGRLSRKLINGIRDKQSGKTILDFLKSDGFANRNFMQLIHDDSLTFKEDIQKAQVSGQGDSLHEHIANLAGSPAIKKGILQTVKVVDELVKVMGRHKPENIVIEMARENQTTQKGQKNSRERMKRIEEGIKELGSQILKEHPVENTQLQNEKLYLYYLQNGRDMYVDQELDINRLSDYDVDHIVPQSFLKDDSIDNKVLTRSDKNRGKSDNVPSEEVVKKMKNYWRQLLNAKLITQRKFDNLTKAERGGLSELDKAGFIKRQLVETRQITKHVAQILDSRMNTKYDENDKLIREVKVITLKSKLVSDFRKDFQFYKVREINNYHHAHDAYLNAVVGTALIKKYPKLESEFVYGDYKVYDVRKMIAKSEQEIGKATAKYFFYSNIMNFFKTEITLANGEIRKRPLIETNGETGEIVWDKGRDFATVRKVLSMPQVNIVKKTEIQTVGQNGGLFDDNPKSPLEVTPSKLVPLKKELNPKKYGGYQKPTTAYPVLLITDTKQLIPISVMNKKQFEQNPVKFLRDRGYQQVGKNDFIKLPKYTLVDIGDGIKRLWASSKEIHKGNQLVVSKKSQILLYHAHHLDSDLSNDYLQNHNQQFDVLFNEIISFSKKCKLGKEHIQKIENVYSNKKNSASIEELAESFIKLLGFTQLGATSPFNFLGVKLNQKQYKGKKDYILPCTEGTLIRQSITGLYETRVDLSKIGED

SEQ ID NO: 440 - protein, 167 aa, Artificial Sequence
  Synthetic
  misc_feature (2)..(11): Xaa can be any naturally occurring amino acid
  misc_feature (13)..(14): Xaa can be any naturally occurring amino acid
  misc_feature (16)..(17): Xaa can be any naturally occurring amino acid
  misc_feature (19)..(25): Xaa can be any naturally occurring amino acid
  misc_feature (27)..(27): Xaa can be any naturally occurring amino acid
  misc_feature (29)..(29): Xaa can be any naturally occurring amino acid
  misc_feature (31)..(34): Xaa can be any naturally occurring amino acid
  misc_feature (36)..(38): Xaa can be any naturally occurring amino acid
  misc_feature (40)..(43): Xaa can be any naturally occurring amino acid
  misc_feature (45)..(54): Xaa can be any naturally occurring amino acid
  misc_feature (58)..(70): Xaa can be any naturally occurring amino acid
  misc_feature (73)..(75): Xaa can be any naturally occurring amino acid
  misc_feature (78)..(78): Xaa can be any naturally occurring amino acid
  misc_feature (81)..(81): Xaa can be any naturally occurring amino acid
  misc_feature (85)..(85): Xaa can be any naturally occurring amino acid
  misc_feature (88)..(88): Xaa can be any naturally occurring amino acid
  misc_feature (90)..(94): Xaa can be any naturally occurring amino acid
  misc_feature (96)..(98): Xaa can be any naturally occurring amino acid
  misc_feature (100)..(101): Xaa can be any naturally occurring amino acid
  misc_feature (103)..(104): Xaa can be any naturally occurring amino acid
  misc_feature (106)..(106): Xaa can be any naturally occurring amino acid
  misc_feature (108)..(108): Xaa can be any naturally occurring amino acid
  misc_feature (110)..(113): Xaa can be any naturally occurring amino acid
  misc_feature (115)..(117): Xaa can be any naturally occurring amino acid
  misc_feature (119)..(123): Xaa can be any naturally occurring amino acid
  misc_feature (126)..(131): Xaa can be any naturally occurring amino acid
  misc_feature (133)..(133): Xaa can be any naturally occurring amino acid
  misc_feature (135)..(137): Xaa can be any naturally occurring amino acid
  misc_feature (139)..(143): Xaa can be any naturally occurring amino acid
  misc_feature (145)..(148): Xaa can be any naturally occurring amino acid
  misc_feature (150)..(163): Xaa can be any naturally occurring amino acid
MXXXXXXXXXXMXXAXXAXXXXXXXEXPXGXXXXBXXXIXXXXNXXXXXXXXXXHAEXXXXXXXXXXXXXRLXXXTLXVTXEPCXMCXGXXXXXRXXXVXXGXXBXKXGXXXXLXXXLXXXXXNHXXXXXXGXLXXXCXXXXXFXXXXRXXXXXXXXXXXXXXDPFD

SEQ ID NO: 441 - protein, 157 aa, B. subtilis
  misc_feature (1)..(7): Xaa can be any naturally occurring amino acid
  misc_feature (9)..(10): Xaa can be any naturally occurring amino acid
  misc_feature (12)..(13): Xaa can be any naturally occurring amino acid
  misc_feature (15)..(21): Xaa can be any naturally occurring amino acid
  misc_feature (23)..(23): Xaa can be any naturally occurring amino acid
  misc_feature (25)..(25): Xaa can be any naturally occurring amino acid
  misc_feature (27)..(30): Xaa can be any naturally occurring amino acid
  misc_feature (32)..(34): Xaa can be any naturally occurring amino acid
  misc_feature (36)..(39): Xaa can be any naturally occurring amino acid
  misc_feature (41)..(50): Xaa can be any naturally occurring amino acid
  misc_feature (54)..(66): Xaa can be any naturally occurring amino acid
  misc_feature (69)..(71): Xaa can be any naturally occurring amino acid
  misc_feature (74)..(74): Xaa can be any naturally occurring amino acid
  misc_feature (77)..(77): Xaa can be any naturally occurring amino acid
  misc_feature (81)..(81): Xaa can be any naturally occurring amino acid
  misc_feature (84)..(84): Xaa can be any naturally occurring amino acid
  misc_feature (86)..(90): Xaa can be any naturally occurring amino acid
  misc_feature (92)..(94): Xaa can be any naturally occurring amino acid
  misc_feature (96)..(97): Xaa can be any naturally occurring amino acid
  misc_feature (99)..(100): Xaa can be any naturally occurring amino acid
  misc_feature (102)..(102): Xaa can be any naturally occurring amino acid
  misc_feature (104)..(104): Xaa can be any naturally occurring amino acid
  misc_feature (106)..(109): Xaa can be any naturally occurring amino acid
  misc_feature (111)..(113): Xaa can be any naturally occurring amino acid
  misc_feature (115)..(119): Xaa can be any naturally occurring amino acid
  misc_feature (122)..(127): Xaa can be any naturally occurring amino acid
  misc_feature (129)..(129): Xaa can be any naturally occurring amino acid
  misc_feature (131)..(133): Xaa can be any naturally occurring amino acid
  misc_feature (135)..(139): Xaa can be any naturally occurring amino acid
  misc_feature (141)..(144): Xaa can be any naturally occurring amino acid
  misc_feature (146)..(157): Xaa can be any naturally occurring amino acid
XXXXXXXMXXAXXAXXXXXXXEXPXGXXXXBXXXIXXXXNXXXXXXXXXXHAEXXXXXXXXXXXXXRLXXXTLXVTXEPCXMCXGXXXXXRXXXVXXGXXBXKXGXXXXLXXXLXXXXXNHXXXXXXGXLXXXCXXXXXFXXXXRXXXXXXXXXXXX

SEQ ID NO: 442 - protein, 152 aa, S. aureus
  misc_feature (1)..(7): Xaa can be any naturally occurring amino acid
  misc_feature (9)..(10): Xaa can be any naturally occurring amino acid
  misc_feature (12)..(13): Xaa can be any naturally occurring amino acid
  misc_feature (15)..(21): Xaa can be any naturally occurring amino acid
  misc_feature (23)..(23): Xaa can be any naturally occurring amino acid
  misc_feature (25)..(25): Xaa can be any naturally occurring amino acid
  misc_feature (27)..(30): Xaa can be any naturally occurring amino acid
  misc_feature (32)..(34): Xaa can be any naturally occurring amino acid
  misc_feature (36)..(39): Xaa can be any naturally occurring amino acid
  misc_feature (41)..(50): Xaa can be any naturally occurring amino acid
  misc_feature (54)..(66): Xaa can be any naturally occurring amino acid
  misc_feature (69)..(71): Xaa can be any naturally occurring amino acid
  misc_feature (74)..(74): Xaa can be any naturally occurring amino acid
  misc_feature (77)..(77): Xaa can be any naturally occurring amino acid
  misc_feature (81)..(81): Xaa can be any naturally occurring amino acid
  misc_feature (84)..(84): Xaa can be any naturally occurring amino acid
  misc_feature (86)..(90): Xaa can be any naturally occurring amino acid
  misc_feature (92)..(94): Xaa can be any naturally occurring amino acid
  misc_feature (96)..(97): Xaa can be any naturally occurring amino acid
  misc_feature (99)..(100): Xaa can be any naturally occurring amino acid
  misc_feature (102)..(102): Xaa can be any naturally occurring amino acid
  misc_feature (104)..(104): Xaa can be any naturally occurring amino acid
  misc_feature (106)..(109): Xaa can be any naturally occurring amino acid
  misc_feature (111)..(113): Xaa can be any naturally occurring amino acid
  misc_feature (115)..(119): Xaa can be any naturally occurring amino acid
  misc_feature (122)..(127): Xaa can be any naturally occurring amino acid
  misc_feature (129)..(129): Xaa can be any naturally occurring amino acid
  misc_feature (131)..(133): Xaa can be any naturally occurring amino acid
  misc_feature (135)..(139): Xaa can be any naturally occurring amino acid
  misc_feature (141)..(144): Xaa can be any naturally occurring amino acid
  misc_feature (146)..(152): Xaa can be any naturally occurring amino acid
XXXXXXXMXXAXXAXXXXXXXEXPXGXXXXBXXXIXXXXNXXXXXXXXXXHAEXXXXXXXXXXXXXRLXXXTLXVTXEPCXMCXGXXXXXRXXXVXXGXXBXKXGXXXXLXXXLXXXXXNHXXXXXXGXLXXXCXXXXXFXXXXRXXXXXXX

SEQ ID NO: 443 - protein, 167 aa, S. pyogenes; identical to SEQ ID NO: 440
  misc_feature (2)..(11): Xaa can be any naturally occurring amino acid
  misc_feature (13)..(14): Xaa can be any naturally occurring amino acid
  misc_feature (16)..(17): Xaa can be any naturally occurring amino acid
  misc_feature (19)..(25): Xaa can be any naturally occurring amino acid
  misc_feature (27)..(27): Xaa can be any naturally occurring amino acid
  misc_feature (29)..(29): Xaa can be any naturally occurring amino acid
  misc_feature (31)..(34): Xaa can be any naturally occurring amino acid
  misc_feature (36)..(38): Xaa can be any naturally occurring amino acid
  misc_feature (40)..(43): Xaa can be any naturally occurring amino acid
  misc_feature (45)..(54): Xaa can be any naturally occurring amino acid
  misc_feature (58)..(70): Xaa can be any naturally occurring amino acid
  misc_feature (73)..(75): Xaa can be any naturally occurring amino acid
  misc_feature (78)..(78): Xaa can be any naturally occurring amino acid
  misc_feature (81)..(81): Xaa can be any naturally occurring amino acid
  misc_feature (85)..(85): Xaa can be any naturally occurring amino acid
  misc_feature (88)..(88): Xaa can be any naturally occurring amino acid
  misc_feature (90)..(94): Xaa can be any naturally occurring amino acid
  misc_feature (96)..(98): Xaa can be any naturally occurring amino acid
  misc_feature (100)..(101): Xaa can be any naturally occurring amino acid
  misc_feature (103)..(104): Xaa can be any naturally occurring amino acid
  misc_feature (106)..(106): Xaa can be any naturally occurring amino acid
  misc_feature (108)..(108): Xaa can be any naturally occurring amino acid
  misc_feature (110)..(113): Xaa can be any naturally occurring amino acid
  misc_feature (115)..(117): Xaa can be any naturally occurring amino acid
  misc_feature (119)..(123): Xaa can be any naturally occurring amino acid
  misc_feature (126)..(131): Xaa can be any naturally occurring amino acid
  misc_feature (133)..(133): Xaa can be any naturally occurring amino acid
  misc_feature (135)..(137): Xaa can be any naturally occurring amino acid
  misc_feature (139)..(143): Xaa can be any naturally occurring amino acid
  misc_feature (145)..(148): Xaa can be any naturally occurring amino acid
  misc_feature (150)..(163): Xaa can be any naturally occurring amino acid

SEQ ID NO: 444 - protein, 162 aa, Artificial Sequence
  Synthetic
  misc_feature (1)..(10): Xaa can be any naturally occurring amino acid
  misc_feature (12)..(13): Xaa can be any naturally occurring amino acid
  misc_feature (15)..(16): Xaa can be any naturally occurring amino acid
  misc_feature (18)..(24): Xaa can be any naturally occurring amino acid
  misc_feature (26)..(26): Xaa can be any naturally occurring amino acid
  misc_feature (28)..(28): Xaa can be any naturally occurring amino acid
  misc_feature (30)..(33): Xaa can be any naturally occurring amino acid
  misc_feature (35)..(37): Xaa can be any naturally occurring amino acid
  misc_feature (39)..(42): Xaa can be any naturally occurring amino acid
  misc_feature (44)..(53): Xaa can be any naturally occurring amino acid
  misc_feature (57)..(69): Xaa can be any naturally occurring amino acid
  misc_feature (72)..(74): Xaa can be any naturally occurring amino acid
  misc_feature (77)..(77): Xaa can be any naturally occurring amino acid
  misc_feature (80)..(80): Xaa can be any naturally occurring amino acid
  misc_feature (84)..(84): Xaa can be any naturally occurring amino acid
  misc_feature (87)..(87): Xaa can be any naturally occurring amino acid
  misc_feature (89)..(93): Xaa can be any naturally occurring amino acid
  misc_feature (95)..(97): Xaa can be any naturally occurring amino acid
  misc_feature (99)..(100): Xaa can be any naturally occurring amino acid
  misc_feature (102)..(103): Xaa can be any naturally occurring amino acid
  misc_feature (105)..(105): Xaa can be any naturally occurring amino acid
  misc_feature (107)..(107): Xaa can be any naturally occurring amino acid
  misc_feature (109)..(112): Xaa can be any naturally occurring amino acid
  misc_feature (114)..(116): Xaa can be any naturally occurring amino acid
  misc_feature (118)..(122): Xaa can be any naturally occurring amino acid
  misc_feature (125)..(130): Xaa can be any naturally occurring amino acid
  misc_feature (132)..(132): Xaa can be any naturally occurring amino acid
  misc_feature (134)..(136): Xaa can be any naturally occurring amino acid
  misc_feature (138)..(142): Xaa can be any naturally occurring amino acid
  misc_feature (144)..(147): Xaa can be any naturally occurring amino acid
  misc_feature (149)..(162): Xaa can be any naturally occurring amino acid
XXXXXXXXXXMXXAXXAXXXXXXXEXPXGXXXXBXXXIXXXXNXXXXXXXXXXHAEXXXXXXXXXXXXXRLXXXTLXVTXEPCXMCXGXXXXXRXXXVXXGXXBXKXGXXXXLXXXLXXXXXNHXXXXXXGXLXXXCXXXXXFXXXXRXXXXXXXXXXXXXX

SEQ ID NO: 445 - RNA, 21 nt, Artificial Sequence
  Synthetic
uaauuucuacuaaguguagau

SEQ ID NO: 446 - RNA, 20 nt, Artificial Sequence
  Synthetic
uaauuucuacucuuguagau

SEQ ID NO: 447 - protein, 1227 aa, Lachnospiraceae bacterium
MSKLEKFTNCYSLSKTLRFKAIPVGKTQENIDNKRLLVEDEKRAEDYKGVKKLLDRYYLSFINDVLHSIKLKNLNNYISLFRKKTRTEKENKELENLEINLRKEIAKAFKGNEGYKSLFKKDIIETILPEFLDDKDEIALVNSFNGFTTAFTGFFDNRENMFSEEAKSTSIAFRCINENLTRYISNMDIFEKVDAIFDKHEVQEIKEKILNSDYDVEDFFEGEFFNFVLTQEGIDVYNAIIGGFVTESGEKIKGLNEYINLYNQKTKQKLPKFKPLYKQVLSDRESLSFYGEGYTSDEEVLEVFRNTLNKNSEIFSSIKKLEKLFKNFDEYSSAGIFVKNGPAISTISKDIFGEWNVIRDKWNAEYDDIHLKKKAVVTEKYEDDRRKSFKKIGSFSLEQLQEYADADLSVVEKLKEIIIQKVDEIYKVYGSSEKLFDADFVLEKSLKKNDAVVAIMKDLLDSVKSFENYIKAFFGEGKETNRDESFYGDFVLAYDILLKVDHIYDAIRNYVTQKPYSKDKFKLYFQNPQFMGGWDKDKETDYRATILRYGSKYYLAIMDKKYAKCLQKIDKDDVNGNYEKINYKLLPGPNKMLPKVFFSKKWMAYYNPSEDIQKIYKNGTFKKGDMFNLNDCHKLIDFFKDSISRYPKWSNAYDFNFSETEKYKDIAGFYREVEEQGYKVSFESASKKEVDKLVEEGKLYMFQIYNKDFSDKSHGTPNLHTMYFKLLFDENNHGQIRLSGGAELFMRRASLKKEELVVHPANSPIANKNPDNPKKTTTLSYDVYKDKRFSEDQYELHIPIAINKCPKNIFKINTEVRVLLKHDDNPYVIGIARGERNLLYIVVVDGKGNIVEQYSLNEIINNFNGIRIKTDYHSLLDKKEKERFEARQNWTSIENIKELKAGYISQVVHKICELVEKYDAVIALEDLNSGFKNSRVKVEKQVYQKFEKMLIDKLNYMVDKKSNPCATGGALKGYQITNKFESFKSMSTQNGFIFYIPAWLTSKIDPSTGFVNLLKTKYTSIADSKKFISSFDRIMYVPEEDLFEFALDYKNFSRTDADYIKKWKLYSYGNRIRIFRNPKKNNVFDWEEVCLTSAYKELFNKYGINYQQGDIRALLCEQSDKAFYSSFMALMSLMLQMRNSITGRTDVDFLISPVKNSDGIFYDSRNYEAQENAILPKNADANGAYNIARKVLWAIGQFKKAEDEKLDKVKIAISNKEWLEYAQTSVK

SEQ ID NO: 448 - protein, 171 aa, Streptococcus pyogenes
MPYSLEEQTYFMQEALKEAEKSLQKAEIPIGCVIVKDGEIIGRGHNAREESNQAIMHAEIMAINEANAHEGNWRLLDTTLFVTIEPCVMCSGAIGLARIPHVIYGASNQKFGGADSLYQILTDERLNHRVQVERGLLAADCANIMQTFFRQGRERKKIAKHLIKEQSDPFD

SEQ ID NO: 449 - protein, 1803 aa, Artificial Sequence
  Synthetic
MKRTADGSEFESPKKKRKVSEVEFSHEYWMRHALTLAKRAWDEREVPVGAVLVHNNRVIGEGWNRPIGRHDPTAHAEIMALRQGGLVMQNYRLIDATLYVTLEPCVMCAGAMIHSRIGRVVFGARDAKTGAAGSLMDVLHHPGMNHRVEITEGILADECAALLSDFFRMRRQEIKAQKKAQSSTDSGGSSGGSSGSETPGTSESATPESSGGSSGGSSEVEFSHEYWMRHALTLAKRARDEREVPVGAVLVLNNRVIGEGWNRAIGLHDPTAHAEIMALRQGGLVMQNYRLIDATLYVTFEPCVMCAGAMIHSRIGRVVFGVRNSKRGAAGSLMNVLNYPGMNHRVEITEGILADECAALLCDFYRMPRQVFNAQKKAQSSINSGGSSGGSSGSETPGTSESATPESSGGSSGGSDKKYSIGLAIGTNSVGWAVITDEYKVPSKKFKVLGNTDRHSIKKNLIGALLFDSGETAEATRLKRTARRRYTRRKNRICYLQEIFSNEMAKVDDSFFHRLEESFLVEEDKKHERHPIFGNIVDEVAYHEKYPTIYHLRKKLVDSTDKADLRLIYLALAHMIKFRGHFLIEGDLNPDNSDVDKLFIQLVQTYNQLFEENPINASGVDAKAILSARLSKSRRLENLIAQLPGEKKNGLFGNLIALSLGLTPNFKSNFDLAEDAKLQLSKDTYDDDLDNLLAQIGDQYADLFLAAKNLSDAILLSDILRVNTEITKAPLSASMVKRYDEHHQDLTLLKALVRQQLPEKYKEIFFDQSKNGYAGYIDGGASQEEFYKFIKPILEKMDGTEELLVKLNREDLLRKQRTFDNGIIPHQIHLGELHAILRRQGDFYPFLKDNREKIEKILTFRIPYYVGPLARGNSRFAWMTRKSEETITPWNFEEVVDKGASAQSFIERMTNFDKNLPNEKVLPKHSLLYEYFTVYNELTKVKYVTEGMRKPAFLSGEQKKAIVDLLFKTNRKVTVKQLKEDYFKKIECFDSVEISGVEDRFNASLGTYHDLLKIIKDKDFLDNEENEDILEDIVLTLTLFEDREMIEERLKTYAHLFDDKVMKQLKRLRYTGWGRLSRKLINGIRDKQSGKTILDFLKSDGFANRNFMQLIHDDSLTFKEDIQKAQVSCQGDSLHEHIANLAGSPAIKKGILQTVKVVDELIKVMGGHKPENIVIEMARENQTTQKGQKNSRERMKRIEEGIKELGSQILKEHPVENTQLQNEKLYLYYLQNGRDMYVDQELDINRLSDYDVDHIVPQSFLKDDSIENKVLTRSDKNRGKSDNVPSEEVVKKMKNYWRQLLNAKLITQRKFDNLTKAERGGLSELDKAGFIKRQLAETRQITKHVAQILDSRMNTKYDENDKLIREVKVITLKSKLVSDFRKDFQFYKVREINNYHHAHDAYLNAVVGTALIKKYPKLESEFVYGDYKVYDVRKMIAKSEQEIGKATAKYFFYSNIMNFFKTEITLANGEIRKRPLIETNGETGEIVWDKGRDFATVRKVLSMPQVNIVKKTEVQTGGFSKESILPKGNSDKLIARKKDWDPKKYGGFNSPTVAYSVLVVAKVEKGKSKKLKSVKELLGITIMERSSFEKNPIGFLEAKGYKEVKKDLIIKLPKYSLFELENGRKRMLASASVLHKGNELALPSKYVNFLYLASHYEKLKGSSEDNKQKQLFVEQHKHYLDEIIEQISEFSKRVILADANLDKVLSAYNKHRDKPIREQAENIIHLFTLTNLGASAAFKYFDTTIGRKLYTSTKEVLDATLIHQSITGLYETRIDLSQLGGDSGGSKRTADGSEFEPKKKRKV

SEQ ID NO: 450 - protein, 1795 aa, Artificial Sequence
  Synthetic
MKRTADGSEFESPKKKRKVSEVEFSHEYWMRHALTLAKRAWDEREVPVGAVLVHNNRVIGEGWNRPIGRHDPTAHAEIMALRQGGLVMQNYRLIDATLYVTLEPCVMCAGAMIHSRIGRVVFGARDAKTGAAGSLMDVLHHPGMNHRVEITEGILADECAALLSDFFRMRRQEIKAQKKAQSSTDSGGSSGGSSGSETPGTSESATPESSGGSSGGSSEVEFSHEYWMRHALTLAKRARDEREVPVGAVLVLNNRVIGEGWNRAIGLHDPTAHAEIMALRQGGLVMQNYRLIDATLYVTFEPCVMCAGAMIHSRIGRVVFGVRNSKRGAAGSLMNVLNYPGMNHRVEITEGILADECAALLCDFYRMPRQVFNAQKKAQSSINSGGSSGGSSGSETPGTSESATPESSGGSSGGSDKKYSIGLAIGTNSVGWAVITDEYKVPSKKFKVLGNTDRHSIKKNLIGALLFDSGETAEATRLKRTARRRYTRRKNRICYLQEIFSNEMAKVDDSFFHRLEESFLVEEDKKHERHPIFGNIVDEVAYHEKYPTIYHLRKKLVDSTDKADLRLIYLALAHMIKFRGHFLIEGDLNPDNSDVDKLFIQLVQTYNQLFEENPINASGVDAKAILSARLSKSRRLENLIAQLPGEKKNGLFGNLIALSLGLTPNFKSNFDLAEDAKLQLSKDTYDDDLDNLLAQIGDQYADLFLAAKNLSDAILLSDILRVNTEITKAPLSASMIKRYDEHHQDLTLLKALVRQQLPEKYKEIFFDQSKNGYAGYIDGGASQEEFYKFIKPILEKMDGTEELLVKLNREDLLRKQRTFDNGSIPHQIHLGELHAILRRQEDFYPFLKDNREKIEKILTFRIPYYVGPLARGNSRFAWMTRKSEETITPWNFEEVVDKGASAQSFIERMTNFDKNLPNEKVLPKHSLLYEYFTVYNELTKVKYVTEGMRKPAFLSGEQKKAIVDLLFKTNRKVTVKQLKEDYFKKIECFDSVEISGVEDRFNASLGTYHDLLKIIKDKDFLDNEENEDILEDIVLTLTLFEDREMIEERLKTYAHLFDDKVMKQLKRRRYTGWGRLSRKLINGIRDKQSGKTILDFLKSDGFANRNFMQLIHDDSLTFKEDIQKAQVSGQGDSLHEHIANLAGSPAIKKGILQTVKVVDELVKVMGRHKPENIVIEMARENQTTQKGQKNSRERMKRIEEGIKELGSQILKEHPVENTQLQNEKLYLYYLQNGRDMYVDQELDINRLSDYDVDHIVPQSFLKDDSIDNKVLTRSDKNRGKSDNVPSEEVVKKMKNYWRQLLNAKLITQRKFDNLTKAERGGLSELDKAGFIKRQLVETRQITKHVAQILDSRMNTKYDENDKLIREVKVITLKSKLVSDFRKDFQFYKVREINNYHHAHDAYLNAVVGTALIKKYPKLESEFVYGDYKVYDVRKMIAKSEQEIGKATAKYFFYSNIMNFFKTEITLANGEIRKRPLIETNGETGEIVWDKGRDFATVRKVLSMPQVNIVKKTEIQTVGQNGGLFDDNPKSPLEVTPSKLVPLKKELNPKKYGGYQKPTTAYPVLLITDTKQLIPISVMNKKQFEQNPVKFLRDRGYQQVGKNDFIKLPKYTLVDIGDGIKRLWASSKEIHKGNQLVVSKKSQILLYHAHHLDSDLSNDYLQNHNQQFDVLFNEIISFSKKCKLGKEHIQKIENVYSNKKNSASIEELAESFIKLLGFTQLGATSPFNFLGVKLNQKQYKGKKDYILPCTEGTLIRQSITGLYETRVDLSKIGEDSGGSKRTADGSEFEPKKKRKV

SEQ ID NO: 451 - protein, 1823 aa, Artificial Sequence
  Synthetic
MKRTADGSEFESPKKKRKVSEVEFSHEYWMRHALTLAKRAWDEREVPVGAVLVHNNRVIGEGWNRPIGRHDPTAHAEIMALRQGGLVMQNYRLIDATLYVTLEPCVMCAGAMIHSRIGRVVFGARDAKTGAAGSLMDVLHHPGMNHRVEITEGILADECAALLSDFFRMRRQEIKAQKKAQSSTDSGGSSGGSSGSETPGTSESATPESSGGSSGGSSEVEFSHEYWMRHALTLAKRARDEREVPVGAVLVLNNRVIGEGWNRAIGLHDPTAHAEIMALRQGGLVMQNYRLIDATLYVTFEPCVMCAGAMIHSRIGRVVFGVRNSKRGAAGSLMNVLNYPGMNHRVEITEGILADECAALLCDFYRMPRQVFNAQKKAQSSINSGGSSGGSSGSETPGTSESATPESSGGSSGGSNIMNFFKTEITLANGEIRKRPLIETNGETGEIVWDKGRDFATVRKVLSMPQVNIVKKTEVQTGGFSKESIRPKRNSDKLIARKKDWDPKKYGGFVSPTVAYSVLVVAKVEKGKSKKLKSVKELLGITIMERSSFEKNPIDFLEAKGYKEVKKDLIIKLPKYSLFELENGRKRMLASARFLQKGNELALPSKYVNFLYLASHYEKLKGSPEDNEQKQLFVEQHKHYLDEIIEQISEFSKRVILADANLDKVLSAYNKHRDKPIREQAENIIHLFTLTNLGAPRAFKYFDTTIDRKVYRSTKEVLDATLIHQSITGLYETRIDLSQLGGDGGSGGSGGSGGSGGSGGSGGDKKYSIGLAIGTNSVGWAVITDEYKVPSKKFKVLGNTDRHSIKKNLIGALLFDSGETAEATRLKRTARRRYTRRKNRICYLQEIFSNEMAKVDDSFFHRLEESFLVEEDKKHERHPIFGNIVDEVAYHEKYPTIYHLRKKLVDSTDKADLRLIYLALAHMIKFRGHFLIEGDLNPDNSDVDKLFIQLVQTYNQLFEENPINASGVDAKAILSARLSKSRRLENLIAQLPGEKKNGLFGNLIALSLGLTPNFKSNFDLAEDAKLQLSKDTYDDDLDNLLAQIGDQYADLFLAAKNLSDAILLSDILRVNTEITKAPLSASMIKRYDEHHQDLTLLKALVRQQLPEKYKEIFFDQSKNGYAGYIDGGASQEEFYKFIKPILEKMDGTEELLVKLNREDLLRKQRTFDNGSIPHQIHLGELHAILRRQEDFYPFLKDNREKIEKILTFRIPYYVGPLARGNSRFAWMTRKSEETITPWNFEEVVDKGASAQSFIERMTNFDKNLPNEKVLPKHSLLYEYFTVYNELTKVKYVTEGMRKPAFLSGEQKKAIVDLLFKTNRKVTVKQLKEDYFKKIECFDSVEISGVEDRFNASLGTYHDLLKIIKDKDFLDNEENEDILEDIVLTLTLFEDREMIEERLKTYAHLFDDKVMKQLKRRRYTGWGRLSRKLINGIRDKQSGKTILDFLKSDGFANRNFMQLIHDDSLTFKEDIQKAQVSGQGDSLHEHIANLAGSPAIKKGILQTVKVVDELVKVMGRHKPENIVIEMARENQTTQKGQKNSRERMKRIEEGIKELGSQILKEHPVENTQLQNEKLYLYYLQNGRDMYVDQELDINRLSDYDVDHIVPQSFLKDDSIDNKVLTRSDKNRGKSDNVPSEEVVKKMKNYWRQLLNAKLITQRKFDNLTKAERGGLSELDKAGFIKRQLVETRQITKHVAQILDSRMNTKYDENDKLIREVKVITLKSKLVSDFRKDFQFYKVREINNYHHAHDAYLNAVVGTALIKKYPKLESEFVYGDYKVYDVRKMIAKSEQEIGKATAKYFFYSSGGSKRTADGSEFEPKKKRKV

SEQ ID NO: 452 - protein, 1489 aa, Artificial Sequence; identical to SEQ ID NO: 172
  Synthetic

SEQ ID NO: 453 - protein, 1803 aa, Artificial Sequence
  Synthetic
MKRTADGSEFESPKKKRKVSEVEFSHEYWMRHALTLAKRAWDEREVPVGAVLVHNNRVIGEGWNRPIGRHDPTAHAEIMALRQGGLVMQNYRLIDATLYVTLEPCVMCAGAMIHSRIGRVVFGARDAKTGAAGSLMDVLHHPGMNHRVEITEGILADECAALLSDFFRMRRQEIKAQKKAQSSTDSGGSSGGSSGSETPGTSESATPESSGGSSGGSSEVEFSHEYWMRHALTLAKRARDEREVPVGAVLVLNNRVIGEGWNRAIGLHDPTAHAEIMALRQGGLVMQNYRLIDATLYVTFEPCVMCAGAMIHSRIGRVVFGVRNSKRGAAGSLMNVLNYPGMNHRVEITEGILADECAALLCDFYRMPRQVFNAQKKAQSSINSGGSSGGSSGSETPGTSESATPESSGGSSGGSDKKYSIGLAIGTNSVGWAVITDEYKVPSKKFKVLGNTDRHSIKKNLIGALLFDSGETAEATRLKRTARRRYTRRKNRICYLQEIFSNEMAKVDDSFFHRLEESFLVEEDKKHERHPIFGNIVDEVAYHEKYPTIYHLRKKLVDSTDKADLRLIYLALAHMIKFRGHFLIEGDLNPDNSDVDKLFIQLVQTYNQLFEENPINASGVDAKAILSARLSKSRRLENLIAQLPGEKKNGLFGNLIALSLGLTPNFKSNFDLAEDAKLQLSKDTYDDDLDNLLAQIGDQYADLFLAAKNLSDAILLSDILRVNTEITKAPLSASMVKRYDEHHQDLTLLKALVRQQLPEKYKEIFFDQSKNGYAGYIDGGASQEEFYKFIKPILEKMDGTEELLVKLNREDLLRKQRTFDNGIIPHQIHLGELHAILRRQGDFYPFLKDNREKIEKILTFRIPYYVGPLARGNSRFAWMTRKSEETITPWNFEEVVDKGASAQSFIERMTNFDKNLPNEKVLPKHSLLYEYFTVYNELTKVKYVTEGMRKPAFLSGEQKKAIVDLLFKTNRKVTVKQLKEDYFKKIECFDSVEISGVEDRFNASLGTYHDLLKIIKDKDFLDNEENEDILEDIVLTLTLFEDREMIEERLKTYAHLFDDKVMKQLKRLRYTGWGRLSRKLINGIRDKQSGKTILDFLKSDGFANRNFMQLIHDDSLTFKEDIQKAQVSCQGDSLHEHIANLAGSPAIKKGILQTVKVVDELIKVMGGHKPENIVIEMARENQTTQKGQKNSRERMKRIEEGIKELGSQILKEHPVENTQLQNEKLYLYYLQNGRDMYVDQELDINRLSDYDVDHIVPQSFLKDDSIENKVLTRSDKNRGKSDNVPSEEVVKKMKNYWRQLLNAKLITQRKFDNLTKAERGGLSELDKAGFIKRQLAETRQITKHVAQILDSRMNTKYDENDKLIREVKVITLKSKLVSDFRKDFQFYKVREINNYHHAHDAYLNAVVGTALIKKYPKLESEFVYGDYKVYDVRKMIAKSEQEIGKATAKYFFYSNIMNFFKTEITLANGEIRKRPLIETNGETGEIVWDKGRDFATVRKVLSMPQVNIVKKTEVQTGGFSKESILPKGNSDKLIARKKDWDPKKYGGFNSPTVAYSVLVVAKVEKGKSKKLKSVKELLGITIMERSSFEKNPIDFLEAKGYKEVKKDLIIKLPKYSLFELENGRKRMLASAGVLQKGNELALPSKYVNFLYLASHYEKLKGSPEDNEQKQLFVEQHKHYLDEIIEQISEFSKRVILADANLDKVLSAYNKHRDKPIREQAENIIHLFTLTNLGAPAAFKYFDTTINRKQYNTTKEVLDATLIRQSITGLYETRIDLSQLGGDSGGSKRTADGSEFEPKKKRKV

SEQ ID NO: 454 - protein, 1803 aa, Artificial Sequence
  Synthetic
MKRTADGSEFESPKKKRKVSEVEFSHEYWMRHALTLAKRAWDEREVPVGAVLVHNNRVIGEGWNRPIGRHDPTAHAEIMALRQGGLVMQNYRLIDATLYVTLEPCVMCAGAMIHSRIGRVVFGARDAKTGAAGSLMDVLHHPGMNHRVEITEGILADECAALLSDFFRMRRQEIKAQKKAQSSTDSGGSSGGSSGSETPGTSESATPESSGGSSGGSSEVEFSHEYWMRHALTLAKRARDEREVPVGAVLVLNNRVIGEGWNRAIGLHDPTAHAEIMALRQGGLVMQNYRLIDATLYVTFEPCVMCAGAMIHSRIGRVVFGVRNSKRGAAGSLMNVLNYPGMNHRVEITEGILADECAALLCDFYRMPRQVFNAQKKAQSSINSGGSSGGSSGSETPGTSESATPESSGGSSGGSDKKYSIGLAIGTNSVGWAVITDEYKVPSKKFKVLGNTDRHSIKKNLIGALLFDSGETAEATRLKRTARRRYTRRKNRICYLQEIFSNEMAKVDDSFFHRLEESFLVEEDKKHERHPIFGNIVDEVAYHEKYPTIYHLRKKLVDSTDKADLRLIYLALAHMIKFRGHFLIEGDLNPDNSDVDKLFIQLVQTYNQLFEENPINASGVDAKAILSARLSKSRRLENLIAQLPGEKKNGLFGNLIALSLGLTPNFKSNFDLAEDAKLQLSKDTYDDDLDNLLAQIGDQYADLFLAAKNLSDAILLSDILRVNTEITKAPLSASMVKRYDEHHQDLTLLKALVRQQLPEKYKEIFFDQSKNGYAGYIDGGASQEEFYKFIKPILEKMDGTEELLVKLNREDLLRKQRTFDNGIIPHQIHLGELHAILRRQGDFYPFLKDNREKIEKILTFRIPYYVGPLARGNSRFAWMTRKSEETITPWNFEEVVDKGASAQSFIERMTNFDKNLPNEKVLPKHSLLYEYFTVYNELTKVKYVTEGMRKPAFLSGEQKKAIVDLLFKTNRKVTVKQLKEDYFKKIECFDSVEISGVEDRFNASLGTYHDLLKIIKDKDFLDNEENEDILEDIVLTLTLFEDREMIEERLKTYAHLFDDKVMKQLKRLRYTGWGRLSRKLINGIRDKQSGKTILDFLKSDGFANRNFMQLIHDDSLTFKEDIQKAQVSCQGDSLHEHIANLAGSPAIKKGILQTVKVVDELIKVMGGHKPENIVIEMARENQTTQKGQKNSRERMKRIEEGIKELGSQILKEHPVENTQLQNEKLYLYYLQNGRDMYVDQELDINRLSDYDVDHIVPQSFLKDDSIENKVLTRSDKNRGKSDNVPSEEVVKKMKNYWRQLLNAKLITQRKFDNLTKAERGGLSELDKAGFIKRQLAETRQITKHVAQILDSRMNTKYDENDKLIREVKVITLKSKLVSDFRKDFQFYKVREINNYHHAHDAYLNAVVGTALIKKYPKLESEFVYGDYKVYDVRKMIAKSEQEIGKATAKYFFYSNIMNFFKTEITLANGEIRKRPLIETNGETGEIVWDKGRDFATVRKVLSMPQVNIVKKTEVQTGGFSKESILPKGNSDKLIARKKDWDPKKYGGFNSPTAAYSVLVVAKVEKGKSKKLKSVKELLGITIMERSSFEKNPIGFLEAKGYKEVKKDLIIKLPKYSLFELENGRKRMLASAGVLHKGNELALPSKYVNFLYLASHYEKLKGSPEDNEQKQLFVEQHKHYLDEIIEQISEFSKRVILADANLDKVLSAYNKHRDKPIREQAENIIHLFTLTNLGVPAAFKYFDTTIDKKRYTSTKEVLDATLIHQSITGLYETRIDLSQLGGDSGGSKRTADGSEFEPKKKRKV

SEQ ID NO: 455 - protein, 1489 aa, Artificial Sequence
  Synthetic
MKRTADGSEFESPKKKRKVSEVEFSHEYWMRHALTLAKRAWDEREVPVGAVLVHNNRVIGEGWNRPIGRHDPTAHAEIMALRQGGLVMQNYRLIDATLYVTLEPCVMCAGAMIHSRIGRVVFGARDAKTGAAGSLMDVLHHPGMNHRVEITEGILADECAALLSDFFRMRRQEIKAQKKAQSSTDSGGSSGGSSGSETPGTSESATPESSGGSSGGSSEVEFSHEYWMRHALTLAKRARDEREVPVGAVLVLNNRVIGEGWNRAIGLHDPTAHAEIMALRQGGLVMQNYRLIDATLYVTFEPCVMCAGAMIHSRIGRVVFGVRNSKRGAAGSLMNVLNYPGMNHRVEITEGILADECAALLCDFYRMPRQVFNAQKKAQSSINSGGSSGGSSGSETPGTSESATPESSGGSSGGSGKRNYILGLAIGITSVGYGIIDYETRDVIDAGVRLFKEANVENNEGRRSKRGARRLKRRRRHRIQRVKKLLFDYNLLTDHSELSGINPYEARVKGLSQKLSEEEFSAALLHLAKRRGVHNVNEVEEDTGNELSTKEQISRNSKALEEKYVAELQLERLKKDGEVRGSINRFKTSDYVKEAKQLLKVQKAYHQLDQSFIDTYIDLLETRRTYYEGPGEGSPFGWKDIKEWYEMLMGHCTYFPEELRSVKYAYNADLYNALNDLNNLVITRDENEKLEYYEKFQIIENVFKQKKKPTLKQIAKEILVNEEDIKGYRVTSTGKPEFTNLKVYHDIKDITARKEIIENAELLDQIAKILTIYQSSEDIQEELTNLNSELTQEEIEQISNLKGYTGTHNLSLKAINLILDELWHTNDNQIAIFNRLKLVPKKVDLSQQKEIPTTLVDDFILSPVVKRSFIQSIKVINAIIKKYGLPNDIIIELAREKNSKDAQKMINEMQKRNRQTNERIEEIIRTTGKENAKYLIEKIKLHDMQEGKCLYSLEAIPLEDLLNNPFNYEVDHIIPRSVSFDNSFNNKVLVKQEENSKKGNRTPFQYLSSSDSKISYETFKKHILNLAKGKGRISKTKKEYLLEERDINRFSVQKDFINRNLVDTRYATRGLMNLLRSYFRVNNLDVKVKSINGGFTSFLRRKWKFKKERNKGYKHHAEDALIIANADFIFKEWKKLDKAKKVMENQMFEEKQAESMPEIETEQEYKEIFITPHQIKHIKDFKDYKYSHRVDKKPNRKLINDTLYSTRKDDKGNTLIVNNLNGLYDKDNDKLKKLINKSPEKLLMYHHDPQTYQKLKLIMEQYGDEKNPLYKYYEETGNYLTKYSKKDNGPVIKKIKYYGNKLNAHLDITDDYPNSRNKVVKLSLKPYRFDVYLDNGVYKFVTVKNLDVIKKENYYEVNSKCYEEAKKLKKISNQAEFIASFYKNDLIKINGELYRVIGVNNDLLNRIEVNMIDITYREYLENMNDKRPPHIIKTIASKTQSIKKYSTDILGNLYEVKSKKHPQIIKKGSGGSKRTADGSEFEPKKKRKV

SEQ ID NO: 456 - protein, 1803 aa, Artificial Sequence; identical to SEQ ID NO: 180
  Synthetic

SEQ ID NO: 457 - protein, 1823 aa, Artificial Sequence
  Synthetic
MKRTADGSEFESPKKKRKVSEVEFSHEYWMRHALTLAKRAWDEREVPVGAVLVHNNRVIGEGWNRPIGRHDPTAHAEIMALRQGGLVMQNYRLIDATLYVTLEPCVMCAGAMIHSRIGRVVFGARDAKTGAAGSLMDVLHHPGMNHRVEITEGILADECAALLSDFFRMRRQEIKAQKKAQSSTDSGGSSGGSSGSETPGTSESATPESSGGSSGGSSEVEFSHEYWMRHALTLAKRARDEREVPVGAVLVLNNRVIGEGWNRAIGLHDPTAHAEIMALRQGGLVMQNYRLIDATLYVTFEPCVMCAGAMIHSRIGRVVFGVRNSKRGAAGSLMNVLNYPGMNHRVEITEGILADECAALLCDFYRMPRQVFNAQKKAQSSINSGGSSGGSSGSETPGTSESATPESSGGSSGGSNIMNFFKTEITLANGEIRKRPLIETNGETGEIVWDKGRDFATVRKVLSMPQVNIVKKTEVQTGGFSKESILPKRNSDKLIARKKDWDPKKYGGFDSPTVAYSVLVVAKVEKGKSKKLKSVKELLGITIMERSSFEKNPIDFLEAKGYKEVKKDLIIKLPKYSLFELENGRKRMLASAGELQKGNELALPSKYVNFLYLASHYEKLKGSPEDNEQKQLFVEQHKHYLDEIIEQISEFSKRVILADANLDKVLSAYNKHRDKPIREQAENIIHLFTLTNLGAPAAFKYFDTTIDRKRYTSTKEVLDATLIHQSITGLYETRIDLSQLGGDGGSGGSGGSGGSGGSGGSGGDKKYSIGLAIGTNSVGWAVITDEYKVPSKKFKVLGNTDRHSIKKNLIGALLFDSGETAEATRLKRTARRRYTRRKNRICYLQEIFSNEMAKVDDSFFHRLEESFLVEEDKKHERHPIFGNIVDEVAYHEKYPTIYHLRKKLVDSTDKADLRLIYLALAHMIKFRGHFLIEGDLNPDNSDVDKLFIQLVQTYNQLFEENPINASGVDAKAILSARLSKSRRLENLIAQLPGEKKNGLFGNLIALSLGLTPNFKSNFDLAEDAKLQLSKDTYDDDLDNLLAQIGDQYADLFLAAKNLSDAILLSDILRVNTEITKAPLSASMIKRYDEHHQDLTLLKALVRQQLPEKYKEIFFDQSKNGYAGYIDGGASQEEFYKFIKPILEKMDGTEELLVKLNREDLLRKQRTFDNGSIPHQIHLGELHAILRRQEDFYPFLKDNREKIEKILTFRIPYYVGPLARGNSRFAWMTRKSEETITPWNFEEVVDKGASAQSFIERMTNFDKNLPNEKVLPKHSLLYEYFTVYNELTKVKYVTEGMRKPAFLSGEQKKAIVDLLFKTNRKVTVKQLKEDYFKKIECFDSVEISGVEDRFNASLGTYHDLLKIIKDKDFLDNEENEDILEDIVLTLTLFEDREMIEERLKTYAHLFDDKVMKQLKRRRYTGWGRLSRKLINGIRDKQSGKTILDFLKSDGFANRNFMQLIHDDSLTFKEDIQKAQVSGQGDSLHEHIANLAGSPAIKKGILQTVKVVDELVKVMGRHKPENIVIEMARENQTTQKGQKNSRERMKRIEEGIKELGSQILKEHPVENTQLQNEKLYLYYLQNGRDMYVDQELDINRLSDYDVDHIVPQSFLKDDSIDNKVLTRSDKNRGKSDNVPSEEVVKKMKNYWRQLLNAKLITQRKFDNLTKAERGGLSELDKAGFIKRQLVETRQITKHVAQILDSRMNTKYDENDKLIREVKVITLKSKLVSDFRKDFQFYKVREINNYHHAHDAYLNAVVGTALIKKYPKLESEFVYGDYKVYDVRKMIAKSEQEIGKATAKYFFYSSGGSKRTADGSEFEPKKKRKV

SEQ ID NO: 458 - protein, 1824 aa, Artificial Sequence; identical to SEQ ID NO: 184
  Synthetic

SEQ ID NO: 459 - protein, 1625 aa, Artificial Sequence
  Synthetic
MKRTADGSEFESPKKKRKVSEVEFSHEYWMRHALTLAKRARDEREVPVGAVLVLNNRVIGEGWNRAIGLHDPTAHAEIMALRQGGLVMQNYRLIDATLYVTFEPCVMCAGAMIHSRIGRVVFGVRNSKRGAAGSLMNVLNYPGMNHRVEITEGILADECAALLCDFYRMPRQVFNAQKKAQSSINSGGSSGGSSGSETPGTSESATPESSGGSSGGSNIMNFFKTEITLANGEIRKRPLIETNGETGEIVWDKGRDFATVRKVLSMPQVNIVKKTEVQTGGFSKESIRPKRNSDKLIARKKDWDPKKYGGFVSPTVAYSVLVVAKVEKGKSKKLKSVKELLGITIMERSSFEKNPIDFLEAKGYKEVKKDLIIKLPKYSLFELENGRKRMLASARFLQKGNELALPSKYVNFLYLASHYEKLKGSPEDNEQKQLFVEQHKHYLDEIIEQISEFSKRVILADANLDKVLSAYNKHRDKPIREQAENIIHLFTLTNLGAPRAFKYFDTTIDRKVYRSTKEVLDATLIHQSITGLYETRIDLSQLGGDGGSGGSGGSGGSGGSGGSGGDKKYSIGLAIGTNSVGWAVITDEYKVPSKKFKVLGNTDRHSIKKNLIGALLFDSGETAEATRLKRTARRRYTRRKNRICYLQEIFSNEMAKVDDSFFHRLEESFLVEEDKKHERHPIFGNIVDEVAYHEKYPTIYHLRKKLVDSTDKADLRLIYLALAHMIKFRGHFLIEGDLNPDNSDVDKLFIQLVQTYNQLFEENPINASGVDAKAILSARLSKSRRLENLIAQLPGEKKNGLFGNLIALSLGLTPNFKSNFDLAEDAKLQLSKDTYDDDLDNLLAQIGDQYADLFLAAKNLSDAILLSDILRVNTEITKAPLSASMIKRYDEHHQDLTLLKALVRQQLPEKYKEIFFDQSKNGYAGYIDGGASQEEFYKFIKPILEKMDGTEELLVKLNREDLLRKQRTFDNGSIPHQIHLGELHAILRRQEDFYPFLKDNREKIEKILTFRIPYYVGPLARGNSRFAWMTRKSEETITPWNFEEVVDKGASAQSFIERMTNFDKNLPNEKVLPKHSLLYEYFTVYNELTKVKYVTEGMRKPAFLSGEQKKAIVDLLFKTNRKVTVKQLKEDYFKKIECFDSVEISGVEDRFNASLGTYHDLLKIIKDKDFLDNEENEDILEDIVLTLTLFEDREMIEERLKTYAHLFDDKVMKQLKRRRYTGWGRLSRKLINGIRDKQSGKTILDFLKSDGFANRNFMQLIHDDSLTFKEDIQKAQVSGQGDSLHEHIANLAGSPAIKKGILQTVKVVDELVKVMGRHKPENIVIEMARENQTTQKGQKNSRERMKRIEEGIKELGSQILKEHPVENTQLQNEKLYLYYLQNGRDMYVDQELDINRLSDYDVDHIVPQSFLKDDSIDNKVLTRSDKNRGKSDNVPSEEVVKKMKNYWRQLLNAKLITQRKFDNLTKAERGGLSELDKAGFIKRQLVETRQITKHVAQILDSRMNTKYDENDKLIREVKVITLKSKLVSDFRKDFQFYKVREINNYHHAHDAYLNAVVGTALIKKYPKLESEFVYGDYKVYDVRKMIAKSEQEIGKATAKYFFYSSGGSKRTADGSEFEPKKKRKV

SEQ ID NO: 460 - protein, 1803 aa, Artificial Sequence
  Synthetic
MKRTADGSEFESPKKKRKVSEVEFSHEYWMRHALTLAKRAWDEREVPVGAVLVHNNRVIGEGWNRPIGRHDPTAHAEIMALRQGGLVMQNYRLIDATLYVTLEPCVMCAGAMIHSRIGRVVFGARDAKTGAAGSLMDVLHHPGMNHRVEITEGILADECAALLSDFFRMRRQEIKAQKKAQSSTDSGGSSGGSSGSETPGTSESATPESSGGSSGGSSEVEFSHEYWMRHALTLAKRARDEREVPVGAVLVLNNRVIGEGWNRAIGLHDPTAHAEIMALRQGGLVMQNYRLIDATLYVTFEPCVMCAGAMIHSRIGRVVFGVRNSKRGAAGSLMNVLNYPGMNHRVEITEGILADECAALLCDFYRMPRQVFNAQKKAQSSINSGGSSGGSSGSETPGTSESATPESSGGSSGGSDKKYSIGLAIGTNSVGWAVITDEYKVPSKKFKVLGNTDRHSIKKNLIGALLFDSGETAEATRLKRTARRRYTRRKNRICYLQEIFSNEMAKVDDSFFHRLEESFLVEEDKKHERHPIFGNIVDEVAYHEKYPTIYHLRKKLVDSTDKADLRLIYLALAHMIKFRGHFLIEGDLNPDNSDVDKLFIQLVQTYNQLFEENPINASGVDAKAILSARLSKSRRLENLIAQLPGEKKNGLFGNLIALSLGLTPNFKSNFDLAEDAKLQLSKDTYDDDLDNLLAQIGDQYADLFLAAKNLSDAILLSDILRVNTEITKAPLSASMIKRYDEHHQDLTLLKALVRQQLPEKYKEIFFDQSKNGYAGYIDGGASQEEFYKFIKPILEKMDGTEELLVKLNREDLLRKQRTFDNGSIPHQIHLGELHAILRRQEDFYPFLKDNREKIEKILTFRIPYYVGPLARGNSRFAWMTRKSEETITPWNFEEVVDKGASAQSFIERMTNFDKNLPNEKVLPKHSLLYEYFTVYNELTKVKYVTEGMRKPAFLSGEQKKAIVDLLFKTNRKVTVKQLKEDYFKKIECFDSVEISGVEDRFNASLGTYHDLLKIIKDKDFLDNEENEDILEDIVLTLTLFEDREMIEERLKTYAHLFDDKVMKQLKRRRYTGWGRLSRKLINGIRDKQSGKTILDFLKSDGFANRNFMQLIHDDSLTFKEDIQKAQVSGQGDSLHEHIANLAGSPAIKKGILQTVKVVDELVKVMGRHKPENIVIEMARENQTTQKGQKNSRERMKRIEEGIKELGSQILKEHPVENTQLQNEKLYLYYLQNGRDMYVDQELDINRLSDYDVDHIVPQSFLKDDSIDNKVLTRSDKNRGKSDNVPSEEVVKKMKNYWRQLLNAKLITQRKFDNLTKAERGGLSELDKAGFIKRQLVETRQITKHVAQILDSRMNTKYDENDKLIREVKVITLKSKLVSDFRKDFQFYKVREINNYHHAHDAYLNAVVGTALIKKYPKLESEFVYGDYKVYDVRKMIAKSEQEIGKATAKYFFYSNIMNFFKTEITLANGEIRKRPLIETNGETGEIVWDKGRDFATVRKVLSMPQVNIVKKTEVQTGGFSKESILPKRNSDKLIARKKDWDPKKYGGFVSPTVAYSVLVVAKVEKGKSKKLKSVKELLGITIMERSSFEKNPIDFLEAKGYKEVKKDLIIKLPKYSLFELENGRKRMLASARELQKGNELALPSKYVNFLYLASHYEKLKGSPEDNEQKQLFVEQHKHYLDEIIEQISEFSKRVILADANLDKVLSAYNKHRDKPIREQAENIIHLFTLTNLGAPAAFKYFDTTIDRKQYRSTKEVLDATLIHQSITGLYETRIDLSQLGGDSGGSKRTADGSEFEPKKKRKV

SEQ ID NO: 461 - protein, 1823 aa, Artificial Sequence; identical to SEQ ID NO: 451
  Synthetic

SEQ ID NO: 462 - protein, 1534 aa, Artificial Sequence
  Synthetic
MKRTADGSEFESPKKKRKVSEVEFSHEYWMRHALTLAKRAWDEREVPVGAVLVHNNRVIGEGWNRPIGRHDPTAHAEIMALRQGGLVMQNYRLIDATLYVTLEPCVMCAGAMIHSRIGRVVFGARDAKTGAAGSLMDVLHHPGMNHRVEITEGILADECAALLSDFFRMRRQEIKAQKKAQSSTDSGGSSGGSSGSETPGTSESATPESSGGSSGGSSEVEFSHEYWMRHALTLAKRARDEREVPVGAVLVLNNRVIGEGWNRAIGLHDPTAHAEIMALRQGGLVMQNYRLIDATLYVTFEPCVMCAGAMIHSRIGRVVFGVRNSKRGAAGSLMNVLNYPGMNHRVEITEGILADECAALLCDFYRMPRQVFNAQKKAQSSINSGGSSGGSSGSETPGTSESATPESSGGSSGGSDKKYSIGLDIGTNSVGWAVITDEYKVPSKKFKVLGNTDRHSIKKNLIGALLFDSGETAEATRLKRTARRRYTRRKNRICYLQEIFSNEMAKVDDSFFHRLEESFLVEEDKKHERHPIFGNIVDEVAYHEKYPTIYHLRKKLVDSTDKADLRLIYLALAHMIKFRGHFLIEGDLNPDNSDVDKLFIQLVQTYNQLFEENPINASGVDAKAILSARLSKSRRLENLIAQLPGEKKNGLFGNLIALSLGLTPNFKSNFDLAEDAKLQLSKDTYDDDLDNLLAQIGDQYADLFLAAKNLSDAILLSDILRVNTEITKAPLSASMIKRYDEHHQDLTLLKALVRQQLPEKYKEIFFDQSKNGYAGYIDGGASQEEFYKFIKPILEKMDGTEELLVKLNREDLLRKQRTFDNGSIPHQIHLGELHAILRRQEDFYPFLKDNREKIEKILTFRIPYYVGPLARGNSRFAWMTRKSEETITPWNFEEVVDKGASAQSFIERMTNFDKNLPNEKVLPKHSLLYEYFTVYNELTKVKYVTEGMRKPAFLSGEQKKAIVDLLFKTNRKVTVKQLKEDYFKKIECFDSVEISGVEDRFNASLGTYHDLLKIIKDKDFLDNEENEDILEDIVLTLTLFEDREMIEERLKTYAHLFDDKVMKQLKRRRYTGWGRLSRKLINGIRDKQSGKTILDFLKSDGFANRNFMQLIHDDSLTFKEDIQKAQVSGQGDSLHEHIANLAGSPAIKKGILQTVKVVDELVKVMGRHKPENIVIEMARENQTTQKGQKNSRERMKRIEEGIKELGSQILKEHPVENTQLQNEKLYLYYLQNGRDMYVDQELDINRLSDYDVDHIVPQSFLKDDSIDNKVLTRSDKNRGKSDNVPSEEVVKKMKNYWRQLLNAKLITQRKFDNLTKAERGGLSELDKAGFIKRQLVETRQITKHVAQILDSRMNTKYDENDKLIREVKVITLKSKLVSDFRKDFQFYKVREINNYHHAHDAYLNAVVGTALIKKYPKLESEFVYGDYKVYDVRKMIAKSEQEIGKATAKYFFYSNIMNFFKTEITLANGEIRKRPLIETNGETGEIVWDKGRDFATVRKVLSMPQVNIVKKTESGGSKRTADGSEFEPKKKRKV

SEQ ID NO: 463 - protein, 1387 aa, Artificial Sequence
  Synthetic
NIMNFFKTEITLANGEIRKRPLIETNGETGEIVWDKGRDFATVRKVLSMPQVNIVKKTEVQTGGFSKESIRPKRNSDKLIARKKDWDPKKYGGFVSPTVAYSVLVVAKVEKGKSKKLKSVKELLGITIMERSSFEKNPIDFLEAKGYKEVKKDLIIKLPKYSLFELENGRKRMLASARFLQKGNELALPSKYVNFLYLASHYEKLKGSPEDNEQKQLFVEQHKHYLDEIIEQISEFSKRVILADANLDKVLSAYNKHRDKPIREQAENIIHLFTLTNLGAPRAFKYFDTTIDRKVYRSTKEVLDATLIHQSITGLYETRIDLSQLGGDGGSGGSGGSGGSGGSGGSGGDKKYSIGLAIGTNSVGWAVITDEYKVPSKKFKVLGNTDRHSIKKNLIGALLFDSGETAEATRLKRTARRRYTRRKNRICYLQEIFSNEMAKVDDSFFHRLEESFLVEEDKKHERHPIFGNIVDEVAYHEKYPTIYHLRKKLVDSTDKADLRLIYLALAHMIKFRGHFLIEGDLNPDNSDVDKLFIQLVQTYNQLFEENPINASGVDAKAILSARLSKSRRLENLIAQLPGEKKNGLFGNLIALSLGLTPNFKSNFDLAEDAKLQLSKDTYDDDLDNLLAQIGDQYADLFLAAKNLSDAILLSDILRVNTEITKAPLSASMIKRYDEHHQDLTLLKALVRQQLPEKYKEIFFDQSKNGYAGYIDGGASQEEFYKFIKPILEKMDGTEELLVKLNREDLLRKQRTFDNGSIPHQIHLGELHAILRRQEDFYPFLKDNREKIEKILTFRIPYYVGPLARGNSRFAWMTRKSEETITPWNFEEVVDKGASAQSFIERMTNFDKNLPNEKVLPKHSLLYEYFTVYNELTKVKYVTEGMRKPAFLSGEQKKAIVDLLFKTNRKVTVKQLKEDYFKKIECFDSVEISGVEDRFNASLGTYHDLLKIIKDKDFLDNEENEDILEDIVLTLTLFEDREMIEERLKTYAHLFDDKVMKQLKRRRYTGWGRLSRKLINGIRDKQSGKTILDFLKSDGFANRNFMQLIHDDSLTFKEDIQKAQVSGQGDSLHEHIANLAGSPAIKKGILQTVKVVDELVKVMGRHKPENIVIEMARENQTTQKGQKNSRERMKRIEEGIKELGSQILKEHPVENTQLQNEKLYLYYLQNGRDMYVDQELDINRLSDYDVDHIVPQSFLKDDSIDNKVLTRSDKNRGKSDNVPSEEVVKKMKNYWRQLLNAKLITQRKFDNLTKAERGGLSELDKAGFIKRQLVETRQITKHVAQILDSRMNTKYDENDKLIREVKVITLKSKLVSDFRKDFQFYKVREINNYHHAHDAYLNAVVGTALIKKYPKLESEFVYGDYKVYDVRKMIAKSEQEIGKATAKYFFYS

SEQ ID NO: 464 - protein, 1387 aa, Artificial Sequence; identical to SEQ ID NO: 463
  Synthetic

SEQ ID NO: 465 - protein, 1605 aa, Artificial Sequence
  Synthetic
MKRTADGSEFESPKKKRKVSEVEFSHEYWMRHALTLAKRARDEREVPVGAVLVLNNRVIGEGWNRAIGLHDPTAHAEIMALRQGGLVMQNYRLIDATLYVTFEPCVMCAGAMIHSRIGRVVFGVRNSKRGAAGSLMNVLNYPGMNHRVEITEGILADECAALLCDFYRMPRQVFNAQKKAQSSINSGGSSGGSSGSETPGTSESATPESSGGSSGGSDKKYSIGLAIGTNSVGWAVITDEYKVPSKKFKVLGNTDRHSIKKNLIGALLFDSGETAEATRLKRTARRRYTRRKNRICYLQEIFSNEMAKVDDSFFHRLEESFLVEEDKKHERHPIFGNIVDEVAYHEKYPTIYHLRKKLVDSTDKADLRLIYLALAHMIKFRGHFLIEGDLNPDNSDVDKLFIQLVQTYNQLFEENPINASGVDAKAILSARLSKSRRLENLIAQLPGEKKNGLFGNLIALSLGLTPNFKSNFDLAEDAKLQLSKDTYDDDLDNLLAQIGDQYADLFLAAKNLSDAILLSDILRVNTEITKAPLSASMVKRYDEHHQDLTLLKALVRQQLPEKYKEIFFDQSKNGYAGYIDGGASQEEFYKFIKPILEKMDGTEELLVKLNREDLLRKQRTFDNGIIPHQIHLGELHAILRRQGDFYPFLKDNREKIEKILTFRIPYYVGPLARGNSRFAWMTRKSEETITPWNFEEVVDKGASAQSFIERMTNFDKNLPNEKVLPKHSLLYEYFTVYNELTKVKYVTEGMRKPAFLSGEQKKAIVDLLFKTNRKVTVKQLKEDYFKKIECFDSVEISGVEDRFNASLGTYHDLLKIIKDKDFLDNEENEDILEDIVLTLTLFEDREMIEERLKTYAHLFDDKVMKQLKRLRYTGWGRLSRKLINGIRDKQSGKTILDFLKSDGFANRNFMQLIHDDSLTFKEDIQKAQVSCQGDSLHEHIANLAGSPAIKKGILQTVKVVDELIKVMGGHKPENIVIEMARENQTTQKGQKNSRERMKRIEEGIKELGSQILKEHPVENTQLQNEKLYLYYLQNGRDMYVDQELDINRLSDYDVDHIVPQSFLKDDSIENKVLTRSDKNRGKSDNVPSEEVVKKMKNYWRQLLNAKLITQRKFDNLTKAERGGLSELDKAGFIKRQLAETRQITKHVAQILDSRMNTKYDENDKLIREVKVITLKSKLVSDFRKDFQFYKVREINNYHHAHDAYLNAVVGTALIKKYPKLESEFVYGDYKVYDVRKMIAKSEQEIGKATAKYFFYSNIMNFFKTEITLANGEIRKRPLIETNGETGEIVWDKGRDFATVRKVLSMPQVNIVKKTEVQTGGFSKESILPKGNSDKLIARKKDWDPKKYGGFNSPTVAYSVLVVAKVEKGKSKKLKSVKELLGITIMERSSFEKNPIGFLEAKGYKEVKKDLIIKLPKYSLFELENGRKRMLASASVLHKGNELALPSKYVNFLYLASHYEKLKGSSEDNKQKQLFVEQHKHYLDEIIEQISEFSKRVILADANLDKVLSAYNKHRDKPIREQAENIIHLFTLTNLGASAAFKYFDTTIGRKLYTSTKEVLDATLIHQSITGLYETRIDLSQLGGDSGGSKRTADGSEFEPKKKRKV

SEQ ID NO: 466 - protein, 1597 aa, Artificial Sequence
  Synthetic
MKRTADGSEFESPKKKRKVSEVEFSHEYWMRHALTLAKRARDEREVPVGAVLVLNNRVIGEGWNRAIGLHDPTAHAEIMALRQGGLVMQNYRLIDATLYVTFEPCVMCAGAMIHSRIGRVVFGVRNSKRGAAGSLMNVLNYPGMNHRVEITEGILADECAALLCDFYRMPRQVFNAQKKAQSSINSGGSSGGSSGSETPGTSESATPESSGGSSGGSDKKYSIGLAIGTNSVGWAVITDEYKVPSKKFKVLGNTDRHSIKKNLIGALLFDSGETAEATRLKRTARRRYTRRKNRICYLQEIFSNEMAKVDDSFFHRLEESFLVEEDKKHERHPIFGNIVDEVAYHEKYPTIYHLRKKLVDSTDKADLRLIYLALAHMIKFRGHFLIEGDLNPDNSDVDKLFIQLVQTYNQLFEENPINASGVDAKAILSARLSKSRRLENLIAQLPGEKKNGLFGNLIALSLGLTPNFKSNFDLAEDAKLQLSKDTYDDDLDNLLAQIGDQYADLFLAAKNLSDAILLSDILRVNTEITKAPLSASMIKRYDEHHQDLTLLKALVRQQLPEKYKEIFFDQSKNGYAGYIDGGASQEEFYKFIKPILEKMDGTEELLVKLNREDLLRKQRTFDNGSIPHQIHLGELHAILRRQEDFYPFLKDNREKIEKILTFRIPYYVGPLARGNSRFAWMTRKSEETITPWNFEEVVDKGASAQSFIERMTNFDKNLPNEKVLPKHSLLYEYFTVYNELTKVKYVTEGMRKPAFLSGEQKKAIVDLLFKTNRKVTVKQLKEDYFKKIECFDSVEISGVEDRFNASLGTYHDLLKIIKDKDFLDNEENEDILEDIVLTLTLFEDREMIEERLKTYAHLFDDKVMKQLKRRRYTGWGRLSRKLINGIRDKQSGKTILDFLKSDGFANRNFMQLIHDDSLTFKEDIQKAQVSGQGDSLHEHIANLAGSPAIKKGILQTVKVVDELVKVMGRHKPENIVIEMARENQTTQKGQKNSRERMKRIEEGIKELGSQILKEHPVENTQLQNEKLYLYYLQNGRDMYVDQELDINRLSDYDVDHIVPQSFLKDDSIDNKVLTRSDKNRGKSDNVPSEEVVKKMKNYWRQLLNAKLITQRKFDNLTKAERGGLSELDKAGFIKRQLVETRQITKHVAQILDSRMNTKYDENDKLIREVKVITLKSKLVSDFRKDFQFYKVREINNYHHAHDAYLNAVVGTALIKKYPKLESEFVYGDYKVYDVRKMIAKSEQEIGKATAKYFFYSNIMNFFKTEITLANGEIRKRPLIETNGETGEIVWDKGRDFATVRKVLSMPQVNIVKKTEIQTVGQNGGLFDDNPKSPLEVTPSKLVPLKKELNPKKYGGYQKPTTAYPVLLITDTKQLIPISVMNKKQFEQNPVKFLRDRGYQQVGKNDFIKLPKYTLVDIGDGIKRLWASSKEIHKGNQLVVSKKSQILLYHAHHLDSDLSNDYLQNHNQQFDVLFNEIISFSKKCKLGKEHIQKIENVYSNKKNSASIEELAESFIKLLGFTQLGATSPFNFLGVKLNQKQYKGKKDYILPCTEGTLIRQSITGLYETRVDLSKIGEDSGGSKRTADGSEFEPKKKRKV

SEQ ID NO: 467 - protein, 1625 aa, Artificial Sequence; identical to SEQ ID NO: 459
  Synthetic

SEQ ID NO: 468 - protein, 1291 aa, Artificial Sequence; identical to SEQ ID NO: 171
  Synthetic

SEQ ID NO: 469 - protein, 1605 aa, Artificial Sequence
  Synthetic
MKRTADGSEFESPKKKRKVSEVEFSHEYWMRHALTLAKRARDEREVPVGAVLVLNNRVIGEGWNRAIGLHDPTAHAEIMALRQGGLVMQNYRLIDATLYVTFEPCVMCAGAMIHSRIGRVVFGVRNSKRGAAGSLMNVLNYPGMNHRVEITEGILADECAALLCDFYRMPRQVFNAQKKAQSSINSGGSSGGSSGSETPGTSESATPESSGGSSGGSDKKYSIGLAIGTNSVGWAVITDEYKVPSKKFKVLGNTDRHSIKKNLIGALLFDSGETAEATRLKRTARRRYTRRKNRICYLQEIFSNEMAKVDDSFFHRLEESFLVEEDKKHERHPIFGNIVDEVAYHEKYPTIYHLRKKLVDSTDKADLRLIYLALAHMIKFRGHFLIEGDLNPDNSDVDKLFIQLVQTYNQLFEENPINASGVDAKAILSARLSKSRRLENLIAQLPGEKKNGLFGNLIALSLGLTPNFKSNFDLAEDAKLQLSKDTYDDDLDNLLAQIGDQYADLFLAAKNLSDAILLSDILRVNTEITKAPLSASMVKRYDEHHQDLTLLKALVRQQLPEKYKEIFFDQSKNGYAGYIDGGASQEEFYKFIKPILEKMDGTEELLVKLNREDLLRKQRTFDNGIIPHQIHLGELHAILRRQGDFYPFLKDNREKIEKILTFRIPYYVGPLARGNSRFAWMTRKSEETITPWNFEEVVDKGASAQSFIERMTNFDKNLPNEKVLPKHSLLYEYFTVYNELTKVKYVTEGMRKPAFLSGEQKKAIVDLLFKTNRKVTVKQLKEDYFKKIECFDSVEISGVEDRFNASLGTYHDLLKIIKDKDFLDNEENEDILEDIVLTLTLFEDREMIEERLKTYAHLFDDKVMKQLKRLRYTGWGRLSRKLINGIRDKQSGKTILDFLKSDGFANRNFMQLIHDDSLTFKEDIQKAQVSCQGDSLHEHIANLAGSPAIKKGILQTVKVVDELIKVMGGHKPENIVIEMARENQTTQKGQKNSRERMKRIEEGIKELGSQILKEHPVENTQLQNEKLYLYYLQNGRDMYVDQELDINRLSDYDVDHIVPQSFLKDDSIENKVLTRSDKNRGKSDNVPSEEVVKKMKNYWRQLLNAKLITQRKFDNLTKAERGGLSELDKAGFIKRQLAETRQITKHVAQILDSRMNTKYDENDKLIREVKVITLKSKLVSDFRKDFQFYKVREINNYHHAHDAYLNAVVGTALIKKYPKLESEFVYGDYKVYDVRKMIAKSEQEIGKATAKYFFYSNIMNFFKTEITLANGEIRKRPLIETNGETGEIVWDKGRDFATVRKVLSMPQVNIVKKTEVQTGGFSKESILPKGNSDKLIARKKDWDPKKYGGFNSPTVAYSVLVVAKVEKGKSKKLKSVKELLGITIMERSSFEKNPIDFLEAKGYKEVKKDLIIKLPKYSLFELENGRKRMLASAGVLQKGNELALPSKYVNFLYLASHYEKLKGSPEDNEQKQLFVEQHKHYLDEIIEQISEFSKRVILADANLDKVLSAYNKHRDKPIREQAENIIHLFTLTNLGAPAAFKYFDTTINRKQYNTTKEVLDATLIRQSITGLYETRIDLSQLGGDSGGSKRTADGSEFEPKKKRKV

SEQ ID NO: 470 - protein, 1336 aa, Artificial Sequence
  Synthetic
MKRTADGSEFESPKKKRKVSEVEFSHEYWMRHALTLAKRARDEREVPVGAVLVLNNRVIGEGWNRAIGLHDPTAHAEIMALRQGGLVMQNYRLIDATLYVTFEPCVMCAGAMIHSRIGRVVFGVRNSKRGAAGSLMNVLNYPGMNHRVEITEGILADECAALLCDFYRMPRQVFNAQKKAQSSINSGGSSGGSSGSETPGTSESATPESSGGSSGGSDKKYSIGLDIGTNSVGWAVITDEYKVPSKKFKVLGNTDRHSIKKNLIGALLFDSGETAEATRLKRTARRRYTRRKNRICYLQEIFSNEMAKVDDSFFHRLEESFLVEEDKKHERHPIFGNIVDEVAYHEKYPTIYHLRKKLVDSTDKADLRLIYLALAHMIKFRGHFLIEGDLNPDNSDVDKLFIQLVQTYNQLFEENPINASGVDAKAILSARLSKSRRLENLIAQLPGEKKNGLFGNLIALSLGLTPNFKSNFDLAEDAKLQLSKDTYDDDLDNLLAQIGDQYADLFLAAKNLSDAILLSDILRVNTEITKAPLSASMIKRYDEHHQDLTLLKALVRQQLPEKYKEIFFDQSKNGYAGYIDGGASQEEFYKFIKPILEKMDGTEELLVKLNREDLLRKQRTFDNGSIPHQIHLGELHAILRRQEDFYPFLKDNREKIEKILTFRIPYYVGPLARGNSRFAWMTRKSEETITPWNFEEVVDKGASAQSFIERMTNFDKNLPNEKVLPKHSLLYEYFTVYNELTKVKYVTEGMRKPAFLSGEQKKAIVDLLFKTNRKVTVKQLKEDYFKKIECFDSVEISGVEDRFNASLGTYHDLLKIIKDKDFLDNEENEDILEDIVLTLTLFEDREMIEERLKTYAHLFDDKVMKQLKRRRYTGWGRLSRKLINGIRDKQSGKTILDFLKSDGFANRNFMQLIHDDSLTFKEDIQKAQVSGQGDSLHEHIANLAGSPAIKKGILQTVKVVDELVKVMGRHKPENIVIEMARENQTTQKGQKNSRERMKRIEEGIKELGSQILKEHPVENTQLQNEKLYLYYLQNGRDMYVDQELDINRLSDYDVDHIVPQSFLKDDSIDNKVLTRSDKNRGKSDNVPSEEVVKKMKNYWRQLLNAKLITQRKFDNLTKAERGGLSELDKAGFIKRQLVETRQITKHVAQILDSRMNTKYDENDKLIREVKVITLKSKLVSDFRKDFQFYKVREINNYHHAHDAYLNAVVGTALIKKYPKLESEFVYGDYKVYDVRKMIAKSEQEIGKATAKYFFYSNIMNFFKTEITLANGEIRKRPLIETNGETGEIVWDKGRDFATVRKVLSMPQVNIVKKTESGGSKRTADGSEFEPKKKRKV

SEQ ID NO: 471 - protein, 1291 aa, Artificial Sequence
  Synthetic
MKRTADGSEFESPKKKRKVSEVEFSHEYWMRHALTLAKRARDEREVPVGAVLVLNNRVIGEGWNRAIGLHDPTAHAEIMALRQGGLVMQNYRLIDATLYVTFEPCVMCAGAMIHSRIGRVVFGVRNSKRGAAGSLMNVLNYPGMNHRVEITEGILADECAALLCDFYRMPRQVFNAQKKAQSSINSGGSSGGSSGSETPGTSESATPESSGGSSGGSGKRNYILGLAIGITSVGYGIIDYETRDVIDAGVRLFKEANVENNEGRRSKRGARRLKRRRRHRIQRVKKLLFDYNLLTDHSELSGINPYEARVKGLSQKLSEEEFSAALLHLAKRRGVHNVNEVEEDTGNELSTKEQISRNSKALEEKYVAELQLERLKKDGEVRGSINRFKTSDYVKEAKQLLKVQKAYHQLDQSFIDTYIDLLETRRTYYEGPGEGSPFGWKDIKEWYEMLMGHCTYFPEELRSVKYAYNADLYNALNDLNNLVITRDENEKLEYYEKFQIIENVFKQKKKPTLKQIAKEILVNEEDIKGYRVTSTGKPEFTNLKVYHDIKDITARKEIIENAELLDQIAKILTIYQSSEDIQEELTNLNSELTQEEIEQISNLKGYTGTHNLSLKAINLILDELWHTNDNQIAIFNRLKLVPKKVDLSQQKEIPTTLVDDFILSPVVKRSFIQSIKVINAIIKKYGLPNDIIIELAREKNSKDAQKMINEMQKRNRQTNERIEEIIRTTGKENAKYLIEKIKLHDMQEGKCLYSLEAIPLEDLLNNPFNYEVDHIIPRSVSFDNSFNNKVLVKQEENSKKGNRTPFQYLSSSDSKISYETFKKHILNLAKGKGRISKTKKEYLLEERDINRFSVQKDFINRNLVDTRYATRGLMNLLRSYFRVNNLDVKVKSINGGFTSFLRRKWKFKKERNKGYKHHAEDALIIANADFIFKEWKKLDKAKKVMENQMFEEKQAESMPEIETEQEYKEIFITPHQIKHIKDFKDYKYSHRVDKKPNRKLINDTLYSTRKDDKGNTLIVNNLNGLYDKDNDKLKKLINKSPEKLLMYHHDPQTYQKLKLIMEQYGDEKNPLYKYYEETGNYLTKYSKKDNGPVIKKIKYYGNKLNAHLDITDDYPNSRNKVVKLSLKPYRFDVYLDNGVYKFVTVKNLDVIKKENYYEVNSKCYEEAKKLKKISNQAEFIASFYKNDLIKINGELYRVIGVNNDLLNRIEVNMIDITYREYLENMNDKRPPHIIKTIASKTQSIKKYSTDILGNLYEVKSKKHPQIIKKGSGGSKRTADGSEFEPKKKRKV

SEQ ID NO: 472 - protein, 1605 aa, Artificial Sequence; identical to SEQ ID NO: 179
  Synthetic

SEQ ID NO: 473 - protein, 1625 aa, Artificial Sequence; identical to SEQ ID NO: 185
  Synthetic

SEQ ID NO: 474 - protein, 1626 aa, Artificial Sequence; identical to SEQ ID NO: 183
  Synthetic

SEQ ID NO: 475 - protein, 1 aa, Artificial Sequence
  Synthetic
  misc_feature (1)..(1): Xaa can be any naturally occurring amino acid
X

SEQ ID NO: 476 - protein, 1605 aa, Artificial Sequence
  Synthetic
MKRTADGSEFESPKKKRKVSEVEFSHEYWMRHALTLAKRARDEREVPVGAVLVLNNRVIGEGWNRAIGLHDPTAHAEIMALRQGGLVMQNYRLIDATLYVTFEPCVMCAGAMIHSRIGRVVFGVRNSKRGAAGSLMNVLNYPGMNHRVEITEGILADECAALLCDFYRMPRQVFNAQKKAQSSINSGGSSGGSSGSETPGTSESATPESSGGSSGGSDKKYSIGLAIGTNSVGWAVITDEYKVPSKKFKVLGNTDRHSIKKNLIGALLFDSGETAEATRLKRTARRRYTRRKNRICYLQEIFSNEMAKVDDSFFHRLEESFLVEEDKKHERHPIFGNIVDEVAYHEKYPTIYHLRKKLVDSTDKADLRLIYLALAHMIKFRGHFLIEGDLNPDNSDVDKLFIQLVQTYNQLFEENPINASGVDAKAILSARLSKSRRLENLIAQLPGEKKNGLFGNLIALSLGLTPNFKSNFDLAEDAKLQLSKDTYDDDLDNLLAQIGDQYADLFLAAKNLSDAILLSDILRVNTEITKAPLSASMIKRYDEHHQDLTLLKALVRQQLPEKYKEIFFDQSKNGYAGYIDGGASQEEFYKFIKPILEKMDGTEELLVKLNREDLLRKQRTFDNGSIPHQIHLGELHAILRRQEDFYPFLKDNREKIEKILTFRIPYYVGPLARGNSRFAWMTRKSEETITPWNFEEVVDKGASAQSFIERMTNFDKNLPNEKVLPKHSLLYEYFTVYNELTKVKYVTEGMRKPAFLSGEQKKAIVDLLFKTNRKVTVKQLKEDYFKKIECFDSVEISGVEDRFNASLGTYHDLLKIIKDKDFLDNEENEDILEDIVLTLTLFEDREMIEERLKTYAHLFDDKVMKQLKRRRYTGWGRLSRKLINGIRDKQSGKTILDFLKSDGFANRNFMQLIHDDSLTFKEDIQKAQVSGQGDSLHEHIANLAGSPAIKKGILQTVKVVDELVKVMGRHKPENIVIEMARENQTTQKGQKNSRERMKRIEEGIKELGSQILKEHPVENTQLQNEKLYLYYLQNGRDMYVDQELDINRLSDYDVDHIVPQSFLKDDSIDNKVLTRSDKNRGKSDNVPSEEVVKKMKNYWRQLLNAKLITQRKFDNLTKAERGGLSELDKAGFIKRQLVETRQITKHVAQILDSRMNTKYDENDKLIREVKVITLKSKLVSDFRKDFQFYKVREINNYHHAHDAYLNAVVGTALIKKYPKLESEFVYGDYKVYDVRKMIAKSEQEIGKATAKYFFYSNIMNFFKTEITLANGEIRKRPLIETNGETGEIVWDKGRDFATVRKVLSMPQVNIVKKTEVQTGGFSKESILPKRNSDKLIARKKDWDPKKYGGFVSPTVAYSVLVVAKVEKGKSKKLKSVKELLGITIMERSSFEKNPIDFLEAKGYKEVKKDLIIKLPKYSLFELENGRKRMLASARELQKGNELALPSKYVNFLYLASHYEKLKGSPEDNEQKQLFVEQHKHYLDEIIEQISEFSKRVILADANLDKVLSAYNKHRDKPIREQAENIIHLFTLTNLGAPAAFKYFDTTIDRKQYRSTKEVLDATLIHQSITGLYETRIDLSQLGGDSGGSKRTADGSEFEPKKKRKV

SEQ ID NO: 477 - protein, 1368 aa, Artificial Sequence
  Synthetic
MDKKYSIGLAIGTNSVGWAVITDEYKVPSKKFKVLGNTDRHSIKKNLIGALLFDSGETAEATRLKRTARRRYTRRKNRICYLQEIFSNEMAKVDDSFFHRLEESFLVEEDKKHERHPIFGNIVDEVAYHEKYPTIYHLRKKLVDSTDKADLRLIYLALAHMIKFRGHFLIEGDLNPDNSDVDKLFIQLVQTYNQLFEENPINASGVDAKAILSARLSKSRRLENLIAQLPGEKKNGLFGNLIALSLGLTPNFKSNFDLAEDAKLQLSKDTYDDDLDNLLAQIGDQYADLFLAAKNLSDAILLSDILRVNTEITKAPLSASMIKRYDEHHQDLTLLKALVRQQLPEKYKEIFFDQSKNGYAGYIDGGASQEEFYKFIKPILEKMDGTEELLVKLNREDLLRKQRTFDNGSIPHQIHLGELHAILRRQEDFYPFLKDNREKIEKILTFRIPYYVGPLARGNSRFAWMTRKSEETITPWNFEEVVDKGASAQSFIERMTNFDKNLPNEKVLPKHSLLYEYFTVYNELTKVKYVTEGMRKPAFLSGEQKKAIVDLLFKTNRKVTVKQLKEDYFKKIECFDSVEISGVEDRFNASLGTYHDLLKIIKDKDFLDNEENEDILEDIVLTLTLFEDREMIEERLKTYAHLFDDKVMKQLKRRRYTGWGRLSRKLINGIRDKQSGKTILDFLKSDGFANRNFMQLIHDDSLTFKEDIQKAQVSGQGDSLHEHIANLAGSPAIKKGILQTVKVVDELVKVMGRHKPENIVIEMARENQTTQKGQKNSRERMKRIEEGIKELGSQILKEHPVENTQLQNEKLYLYYLQNGRDMYVDQELDINRLSDYDVDHIVPQSFLKDDSIDNKVLTRSDKNRGKSDNVPSEEVVKKMKNYWRQLLNAKLITQRKFDNLTKAERGGLSELDKAGFIKRQLVETRQITKHVAQILDSRMNTKYDENDKLIREVKVITLKSKLVSDFRKDFQFYKVREINNYHHAHDAYLNAVVGTALIKKYPKLESEFVYGDYKVYDVRKMIAKSEQEIGKATAKYFFYSNIMNFFKTEITLANGEIRKRPLIETNGETGEIVWDKGRDFATVRKVLSMPQVNIVKKTEVQTGGFSKESIRPKRNSDKLIARKKDWDPKKYGGFVSPTVAYSVLVVAKVEKGKSKKLKSVKELLGITIMERSSFEKNPIDFLEAKGYKEVKKDLIIKLPKYSLFELENGRKRMLASARFLQKGNELALPSKYVNFLYLASHYEKLKGSPEDNEQKQLFVEQHKHYLDEIIEQISEFSKRVILADANLDKVLSAYNKHRDKPIREQAENIIHLFTLTNLGAPRAFKYFDTTIDRKVYRSTKEVLDATLIHQSITGLYETRIDLSQLGGD

SEQ ID NO: 478 - protein, 1054 aa, S. aureus
MGKRNYILGLAIGITSVGYGIIDYETRDVIDAGVRLFKEANVENNEGRRSKRGARRLKRRRRHRIQRVKKLLFDYNLLTDHSELSGINPYEARVKGLSQKLSEEEFSAALLHLAKRRGVHNVNEVEEDTGNELSTKEQISRNSKALEEKYVAELQLERLKKDGEVRGSINRFKTSDYVKEAKQLLKVQKAYHQLDQSFIDTYIDLLETRRTYYEGPGEGSPFGWKDIKEWYEMLMGHCTYFPEELRSVKYAYNADLYNALNDLNNLVITRDENEKLEYYEKFQIIENVFKQKKKPTLKQIAKEILVNEEDIKGYRVTSTGKPEFTNLKVYHDIKDITARKEIIENAELLDQIAKILTIYQSSEDIQEELTNLNSELTQEEIEQISNLKGYTGTHNLSLKAINLILDELWHTNDNQIAIFNRLKLVPKKVDLSQQKEIPTTLVDDFILSPVVKRSFIQSIKVINAIIKKYGLPNDIIIELAREKNSKDAQKMINEMQKRNRQTNERIEEIIRTTGKENAKYLIEKIKLHDMQEGKCLYSLEAIPLEDLLNNPFNYEVDHIIPRSVSFDNSFNNKVLVKQEENSKKGNRTPFQYLSSSDSKISYETFKKHILNLAKGKGRISKTKKEYLLEERDINRFSVQKDFINRNLVDTRYATRGLMNLLRSYFRVNNLDVKVKSINGGFTSFLRRKWKFKKERNKGYKHHAEDALIIANADFIFKEWKKLDKAKKVMENQMFEEKQAESMPEIETEQEYKEIFITPHQIKHIKDFKDYKYSHRVDKKPNRKLINDTLYSTRKDDKGNTLIVNNLNGLYDKDNDKLKKLINKSPEKLLMYHHDPQTYQKLKLIMEQYGDEKNPLYKYYEETGNYLTKYSKKDNGPVIKKIKYYGNKLNAHLDITDDYPNSRNKVVKLSLKPYRFDVYLDNGVYKFVTVKNLDVIKKENYYEVNSKCYEEAKKLKKISNQAEFIASFYKNDLIKINGELYRVIGVNNDLLNRIEVNMIDITYREYLENMNDKRPPHIIKTIASKTQSIKKYSTDILGNLYEVKSKKHPQIIKKG

SEQ ID NO: 479 - protein, 1368 aa, Artificial Sequence
  Synthetic
MDKKYSIGLAIGTNSVGWAVITDEYKVPSKKFKVLGNTDRHSIKKNLIGALLFDSGETAEATRLKRTARRRYTRRKNRICYLQEIFSNEMAKVDDSFFHRLEESFLVEEDKKHERHPIFGNIVDEVAYHEKYPTIYHLRKKLVDSTDKADLRLIYLALAHMIKFRGHFLIEGDLNPDNSDVDKLFIQLVQTYNQLFEENPINASGVDAKAILSARLSKSRRLENLIAQLPGEKKNGLFGNLIALSLGLTPNFKSNFDLAEDTKLQLSKDTYDDDLDNLLAQIGDQYADLFLAAKNLSDAILLSDILRVNTEITKAPLSASMIKLYDEHHQDLTLLKALVRQQLPEKYKEIFFDQSKNGYAGYIDGGASQEEFYKFIKPILEKMDGTEELLVKLNREDLLRKQRTFDNGIIPHQIHLGELHAILRRQEDFYPFLKDNREKIEKILTFRIPYYVGPLARGNSRFAWMTRKSEETITPWNFEKVVDKGASAQSFIERMTNFDKNLPNEKVLPKHSLLYEYFTVYNELTKVKYVTEGMRKPAFLSGDQKKAIVDLLFKTNRKVTVKQLKEDYFKKIECFDSVEISGVEDRFNASLGTYHDLLKIIKDKDFLDNEENEDILEDIVLTLTLFEDREMIEERLKTYAHLFDDKVMKQLKRRRYTGWGRLSRKLINGIRDKQSGKTILDFLKSDGFANRNFIQLIHDDSLTFKEDIQKAQVSGQGDSLHEHIANLAGSPAIKKGILQTVKVVDELVKVMGRHKPENIVIEMARENQTTQKGQKNSRERMKRIEEGIKELGSQILKEHPVENTQLQNEKLYLYYLQNGRDMYVDQELDINRLSDYDVDHIVPQSFLKDDSIDNKVLTRSDKNRGKSDNVPSEEVVKKMKNYWRQLLNAKLITQRKFDNLTKAERGGLSELDKAGFIKRQLVETRQITKHVAQILDSRMNTKYDENDKLIREVKVITLKSKLVSDFRKDFQFYKVREINNYHHAHDAYLNAVVGTALIKKYPKLESEFVYGDYKVYDVRKMIAKSEQEIGKATAKYFFYSNIMNFFKTEITLANGEIRKRPLIETNGETGEIVWDKGRDFATVRKVLSMPQVNIVKKTEVQTGGFSKESILPKRNSDKLIARKKDWDPKKYGGFDSPTVAYSVLVVAKVEKGKSKKLKSVKELLGITIMERSSFEKNPIDFLEAKGYKEVKKDLIIKLPKYSLFELENGRKRMLASAGVLQKGNELALPSKYVNFLYLASHYEKLKGSPEDNEQKQLFVEQHKHYLDEIIEQISEFSKRVILADANLDKVLSAYNKHRDKPIREQAENIIHLFTLTNLGAPAAFKYFDTTIDRKRYTSTKEVLDATLIHQSITGLYETRIDLSQLGGD

SEQ ID NO: 480 - protein, 1368 aa, Artificial Sequence
  Synthetic
MDKKYSIGLAIGTNSVGWAVITDEYKVPSKKFKVLGNTDRHSIKKNLIGALLFDSGETAEATRLKRTARRRYTRRKNRICYLQEIFSNEMAKVDDSFFHRLEESFLVEEDKKHERHPIFGNIVDEVAYHEKYPTIYHLRKKLVDSTDKADLRLIYLALAHMIKFRGHFLIEGDLNPDNSDVDKLFIQLVQTYNQLFEENPINASGVDAKAILSARLSKSRRLENLIAQLPGEKKNGLFGNLIALSLGLTPNFKSNFDLAEDAKLQLSKDTYDDDLDNLLAQIGDQYADLFLAAKNLSDAILLSDILRVNTEITKAPLSASMIKRYDEHHQDLTLLKALVRQQLPEKYKEIFFDQSKNGYAGYIDGGASQEEFYKFIKPILEKMDGTEELLVKLNREDLLRKQRTFDNGSIPHQIHLGELHAILRRQEDFYPFLKDNREKIEKILTFRIPYYVGPLARGNSRFAWMTRKSEETITPWNFEEVVDKGASAQSFIERMTNFDKNLPNEKVLPKHSLLYEYFTVYNELTKVKYVTEGMRKPAFLSGEQKKAIVDLLFKTNRKVTVKQLKEDYFKKIECFDSVEISGVEDRFNASLGTYHDLLKIIKDKDFLDNEENEDILEDIVLTLTLFEDREMIEERLKTYAHLFDDKVMKQLKRRRYTGWGRLSRKLINGIRDKQSGKTILDFLKSDGFANRNFMQLIHDDSLTFKEDIQKAQVSGQGDSLHEHIANLAGSPAIKKGILQTVKVVDELVKVMGRHKPENIVIEMARENQTTQKGQKNSRERMKRIEEGIKELGSQILKEHPVENTQLQNEKLYLYYLQNGRDMYVDQELDINRLSDYDVDHIVPQSFLKDDSIDNKVLTRSDKNRGKSDNVPSEEVVKKMKNYWRQLLNAKLITQRKFDNLTKAERGGLSELDKAGFIKRQLVETRQITKHVAQILDSRMNTKYDENDKLIREVKVITLKSKLVSDFRKDFQFYKVREINNYHHAHDAYLNAVVGTALIKKYPKLESEFVYGDYKVYDVRKMIAKSEQEIGKATAKYFFYSNIMNFFKTEITLANGEIRKRPLIETNGETGEIVWDKGRDFATVRKVLSMPQVNIVKKTEVQTGGFSKESILPKRNSDKLIARKKDWDPKKYGGFVSPTVAYSVLVVAKVEKGKSKKLKSVKELLGITIMERSSFEKNPIDFLEAKGYKEVKKDLIIKLPKYSLFELENGRKRMLASAGELQKGNELALPSKYVNFLYLASHYEKLKGSPEDNEQKQLFVEQHKHYLDEIIEQISEFSKRVILADANLDKVLSAYNKHRDKPIREQAENIIHLFTLTNLGAPAAFKYFDTTIDRKQYRSTKEVLDATLIHQSITGLYETRIDLSQLGGD

SEQ ID NO: 481 - protein, 1368 aa, Artificial Sequence
  Synthetic
MDKKYSIGLAIGTNSVGWAVITDEYKVPSKKFKVLGNTDRHSIKKNLIGALLFDSGETAEATRLKRTARRRYTRRKNRICYLQEIFSNEMAKVDDSFFHRLEESFLVEEDKKHERHPIFGNIVDEVAYHEKYPTIYHLRKKLVDSTDKADLRLIYLALAHMIKFRGHFLIEGDLNPDNSDVDKLFIQLVQTYNQLFEENPINASGVDAKAILSARLSKSRRLENLIAQLPGEKKNGLFGNLIALSLGLTPNFKSNFDLAEDAKLQLSKDTYDDDLDNLLAQIGDQYADLFLAAKNLSDAILLSDILRVNTEITKAPLSASMIKRYDEHHQDLTLLKALVRQQLPEKYKEIFFDQSKNGYAGYIDGGASQEEFYKFIKPILEKMDGTEELLVKLNREDLLRKQRTFDNGSIPHQIHLGELHAILRRQEDFYPFLKDNREKIEKILTFRIPYYVGPLARGNSRFAWMTRKSEETITPWNFEEVVDKGASAQSFIERMTNFDKNLPNEKVLPKHSLLYEYFTVYNELTKVKYVTEGMRKPAFLSGEQKKAIVDLLFKTNRKVTVKQLKEDYFKKIECFDSVEISGVEDRFNASLGTYHDLLKIIKDKDFLDNEENEDILEDIVLTLTLFEDREMIEERLKTYAHLFDDKVMKQLKRRRYTGWGRLSRKLINGIRDKQSGKTILDFLKSDGFANRNFMQLIHDDSLTFKEDIQKAQVSGQGDSLHEHIANLAGSPAIKKGILQTVKVVDELVKVMGRHKPENIVIEMARENQTTQKGQKNSRERMKRIEEGIKELGSQILKEHPVENTQLQNEKLYLYYLQNGRDMYVDQELDINRLSDYDVDHIVPQSFLKDDSIDNKVLTRSDKNRGKSDNVPSEEVVKKMKNYWRQLLNAKLITQRKFDNLTKAERGGLSELDKAGFIKRQLVETRQITKHVAQILDSRMNTKYDENDKLIREVKVITLKSKLVSDFRKDFQFYKVREINNYHHAHDAYLNAVVGTALIKKYPKLESEFVYGDYKVYDVRKMIAKSEQEIGKATAKYFFYSNIMNFFKTEITLANGEIRKRPLIETNGETGEIVWDKGRDFATVRKVLSMPQVNIVKKTEVQTGGFSKESILPKRNSDKLIARKKDWDPKKYGGFESPTVAYSVLVVAKVEKGKSKKLKSVKELLGITIMERSSFEKNPIDFLEAKGYKEVKKDLIIKLPKYSLFELENGRKRMLASAGELQKGNELALPSKYVNFLYLASHYEKLKGSPEDNEQKQLFVEQHKHYLDEIIEQISEFSKRVILADANLDKVLSAYNKHRDKPIREQAENIIHLFTLTNLGAPAAFKYFDTTIDRKQYRSTKEVLDATLIHQSITGLYETRIDLSQLGGD

SEQ ID NO: 482 - protein, 19 aa, Artificial Sequence
  Synthetic
NLSKRPAAIKKAGQAKKKK

SEQ ID NO: 483 - protein, 9 aa, Artificial Sequence
  Synthetic
PAAKRVKLD

SEQ ID NO: 484 - protein, 11 aa, Artificial Sequence
  Synthetic
RQRRNELKRSF

SEQ ID NO: 485 - protein, 38 aa, Artificial Sequence
  Synthetic
NQSSNFGPMKGGNFGGRSSGPYGGGGQYFAKPRNQGGY

SEQ ID NO: 486 - protein, 16 aa, Artificial Sequence
  Synthetic
  misc_feature (3)..(12): Xaa can be any naturally occurring amino acid
KRXXXXXXXXXXKKKL

SEQ ID NO: 487 - protein, 1775 aa, Artificial Sequence
  Synthetic
MSEVEFSHEYWMRHALTLAKRAWDEREVPVGAVLVHNNRVIGEGWNRPIGRHDPTAHAEIMALRQGGLVMQNYRLIDATLYVTLEPCVMCAGAMIHSRIGRVVFGARDAKTGAAGSLMDVLHHPGMNHRVEITEGILADECAALLSDFFRMRRQEIKAQKKAQSSTDSGGSSGGSSGSETPGTSESATPESSGGSSGGSSEVEFSHEYWMRHALTLAKRARDEREVPVGAVLVLNNRVIGEGWNRAIGLHDPTAHAEIMALRQGGLVMQNYRLIDATLYVTFEPCVMCAGAMIHSRIGRVVFGVRNAKTGAAGSLMDVLHYPGMNHRVEITEGILADECAALLCYFFRMPRQVFNAQKKAQSSTDSGGSSGGSSGSETPGTSESATPESSGGSSGGSDKKYSIGLAIGTNSVGWAVITDEYKVPSKKFKVLGNTDRHSIKKNLIGALLFDSGETAEATRLKRTARRRYTRRKNRICYLQEIFSNEMAKVDDSFFHRLEESFLVEEDKKHERHPIFGNIVDEVAYHEKYPTIYHLRKKLVDSTDKADLRLIYLALAHMIKFRGHFLIEGDLNPDNSDVDKLFIQLVQTYNQLFEENPINASGVDAKAILSARLSKSRRLENLIAQLPGEKKNGLFGNLIALSLGLTPNFKSNFDLAEDAKLQLSKDTYDDDLDNLLAQIGDQYADLFLAAKNLSDAILLSDILRVNTEITKAPLSASMIKRYDEHHQDLTLLKALVRQQLPEKYKEIFFDQSKNGYAGYIDGGASQEEFYKFIKPILEKMDGTEELLVKLNREDLLRKQRTFDNGSIPHQIHLGELHAILRRQEDFYPFLKDNREKIEKILTFRIPYYVGPLARGNSRFAWMTRKSEETITPWNFEEVVDKGASAQSFIERMTNFDKNLPNEKVLPKHSLLYEYFTVYNELTKVKYVTEGMRKPAFLSGEQKKAIVDLLFKTNRKVTVKQLKEDYFKKIECFDSVEISGVEDRFNASLGTYHDLLKIIKDKDFLDNEENEDILEDIVLTLTLFEDREMIEERLKTYAHLFDDKVMKQLKRRRYTGWGRLSRKLINGIRDKQSGKTILDFLKSDGFANRNFMQLIHDDSLTFKEDIQKAQVSGQGDSLHEHIANLAGSPAIKKGILQTVKVVDELVKVMGRHKPENIVIEMARENQTTQKGQKNSRERMKRIEEGIKELGSQILKEHPVENTQLQNEKLYLYYLQNGRDMYVDQELDINRLSDYDVDHIVPQSFLKDDSIDNKVLTRSDKNRGKSDNVPSEEVVKKMKNYWRQLLNAKLITQRKFDNLTKAERGGLSELDKAGFIKRQLVETRQITKHVAQILDSRMNTKYDENDKLIREVKVITLKSKLVSDFRKDFQFYKVREINNYHHAHDAYLNAVVGTALIKKYPKLESEFVYGDYKVYDVRKMIAKSEQEIGKATAKYFFYSNIMNFFKTEITLANGEIRKRPLIETNGETGEIVWDKGRDFATVRKVLSMPQVNIVKKTEVQTGGFSKESILPKRNSDKLIARKKDWDPKKYGGFDSPTVAYSVLVVAKVEKGKSKKLKSVKELLGITIMERSSFEKNPIDFLEAKGYKEVKKDLIIKLPKYSLFELENGRKRMLASAGELQKGNELALPSKYVNFLYLASHYEKLKGSPEDNEQKQLFVEQHKHYLDEIIEQISEFSKRVILADANLDKVLSAYNKHRDKPIREQAENIIHLFTLTNLGAPAAFKYFDTTIDRKRYTSTKEVLDATLIHQSITGLYETRIDLSQLGGDSGGSPKKKRKV

SEQ ID NO: 488 - protein, 6 aa, Artificial Sequence
  Synthetic
NNGRRT

SEQ ID NO: 489 - protein, 4 aa, Artificial Sequence
  Synthetic
TTTV

SEQ ID NO: 490 - protein, 33 aa, Artificial Sequence
  Synthetic
NGNNGNNGNNGNNGNNGNNGNNGNNGNNGNNGN

SEQ ID NO: 491 - protein, 42 aa, Artificial Sequence
  Synthetic
NNNRRTNNNRRTNNNRRTNNNRRTNNNRRTNNNRRTNNNRRT

SEQ ID NO: 492 - DNA, 58 bp, Artificial Sequence
  Synthetic
  misc_feature (34)..(37): n is a, c, g, or t
acactctttccctacacgacgctcttccgatctnnnnagggttggccaatctactccc

SEQ ID NO: 493 - DNA, 51 bp, Artificial Sequence
  Synthetic
tggagttcagacgtgtgctcttccgatctgtcttctctgtctccacatgcc

SEQ ID NO: 494 - DNA, 47 bp, Artificial Sequence
  Synthetic
ctacacgacgctcttccgatcttggccaatctactcccaggagcagg

SEQ ID NO: 495 - DNA, 47 bp, Artificial Sequence
  Synthetic
cagacgtgtgctcttccgatcttcaaagaacctctgggtccaagggt

SEQ ID NO: 496 - protein, 9 aa, Artificial Sequence
  Synthetic
MVHLTPVEK

SEQ ID NO: 497 - DNA, 27 bp, Artificial Sequence
  Synthetic
atggtgcacctgactcctgtggagaag

SEQ ID NO: 498 - DNA, 27 bp, Artificial Sequence
  Synthetic
cttctccacaggagtcaggtgcaccat

SEQ ID NO: 499 - protein, 4 aa, Artificial Sequence
  Synthetic
PTPA

1. An adenosine deaminase that comprises the substitutions selected from T111X₁, D119X₂, and F149X₃, and further comprises at least one substitution selected from R26X₄, V88X₅, A109X₆, H122X₇, T166X₈, and D167X₉, relative to the amino acid sequence of SEQ ID NO: 315, or a corresponding substitution(s) in another adenosine deaminase, wherein X₁ is any amino acid other than T, X₂ is any amino acid other than D, X₃ is any amino acid other than F, X₄ is any amino acid other than R, X₅ is any amino acid other than V, X₆ is any amino acid other than A, X₇ is any amino acid other than H, X₈ is any amino acid other than T, and X₉ is any amino acid other than D.

2. The adenosine deaminase of claim 1, wherein X₁ is R, X₂ is D, and X₃ is Y.

3. The adenosine deaminase of claim 1, wherein X₆ is 5, X₇ is N, X₈ is I, and X₉ is N.

4. The adenosine deaminase of claim 1, wherein X₄ is C and X₅ is A.

5. The adenosine deaminase of claim 1, further comprising a Y167X₁₀ relative to the amino acid sequence of SEQ ID NO: 315, or a corresponding substitution in another adenosine deaminase, wherein X₁₀ is any amino acid other than Y.

6-8. (canceled)

9. An adenosine deaminase that comprises T111R, D119N, and F149Y substitutions, and further comprises at least one substitution selected from R26C, V88A, A109S, H122N, T1661, and D167N, relative to the amino acid sequence of SEQ ID NO: 315, or corresponding substitutions in another adenosine deaminase.

10. The adenosine deaminase of claim 9, wherein the adenosine deaminase comprises A109S, T111R, D119N, H122N, F149Y, T1661, and D167N substitutions in SEQ ID NO: 315.

11. The adenosine deaminase of claim 9, wherein the adenosine deaminase comprises T111R, D119N, and F149Y substitutions and an R26C or V88A substitution in SEQ ID NO: 315.

12. The adenosine deaminase of claim 9, further comprising a Y147D substitution.

13. The adenosine deaminase of claim 9, wherein the adenosine deaminase comprises A109S, T111R, D119N, H122N, Y147D, F149Y, T1661, and D167N substitutions in SEQ ID NO: 315.

14. The adenosine deaminase of claim 9, further comprising at least one substitution in the amino acid sequence of SEQ ID NO: 315 selected from K20A, R21A, V82G, and V106W.

15. The adenosine deaminase of claim 9, wherein the adenosine deaminase comprises V106W, A109S, T111R, D119N, H122N, Y147D, F149Y, T1661, and D167N substitutions in SEQ ID NO: 315.

16. The adenosine deaminase of claim 9, wherein the adenosine deaminase comprises the following substitutions relative to the amino acid sequence of SEQ ID NO: 325: W23R, H36L, P48A, R51L, L84F, A106V, D108N, A109S, T111R, D119N, H122N, H123Y, S146C, F149Y, R152P, E155V, I156F, K157N, T1661, and D167N.

17. The adenosine deaminase of claim 9, wherein the adenosine deaminase comprises the following substitutions relative to the amino acid sequence of SEQ ID NO: 325: W23R, H36L, P48A, R51L, L84F, A106W, D108N, A109S, T111R, D119N, H122N, H123Y, S146C, F149Y, R152P, E155V, I156F, K157N, T1661, and D167N.

18-55. (canceled)

56. A base editor comprising an amino acid sequence that is at least 80% identical to the amino acid sequence of any one of SEQ ID NOs: 169-188, 449-462, and 465-476.

57-63. (canceled)

64. The base editor of claim 56, wherein the base editor generates less than 20% indel formation when contacted with a nucleic acid comprising a target sequence.

65. The base editor of claim 56, wherein the base editor provides an efficiency of conversion of an adenine (A) base to a guanine (G) base of at least 70when contacted with a DNA comprising a target sequence selected from the group consisting of AAA, AAT, AAC, AAG, TAA, TAT, TAC, TAG, CAA, CAT, CAC, CAG, GAA, GAT, GAC, and GAG.

66-68. (canceled)

69. The base editor of claim 56, wherein the base editor causes an off-target DNA editing frequency of less than 1.5% when contacted with a DNA comprising a target sequence.

70-71. (canceled)

72. The base editor of claim 56, wherein the base editor provides an adenosine (A) to inosine (I) editing frequency in RNA of 0.3% or less when contacted with a DNA comprising a target sequence.

73-75. (canceled)

76. The base editor of claim 56, wherein the base editor is selected from ABE8e, ABE8e(TadA-8e V106W), CP1028-ABE8e, CP1041-ABE8e, and ABE8e-NRCH.

77-188. (canceled)
